(19) United States
(12) Patent Application Publication
(10) Pub. No.: US 2023/0340455 A1
(43) Pub. Date: Oct. 26, 2023

(54) METHOD FOR EDITING TARGET DNA, METHOD FOR PRODUCING CELL IN WHICH TARGET DNA IS EDITED, AND DNA EDITING SYSTEM FOR USE IN THESE

(71) Applicants: Hiroshima University, Higashi-Hiroshima-shi (JP); SUMITOMO CHEMICAL COMPANY, LIMITED, Chuo-ku (JP)

(72) Inventors: Tetsushi SAKUMA, Higashi-Hiroshima-shi (JP); Takashi YAMAMOTO, Higashi-Hiroshima-shi (JP); Nahoko NISHIBORI, Higashi-Hiroshima-shi (JP); Tadahiko YOSHIMA, Osaka-shi (JP); Kazuhiko HORIGOME, Osaka-shi (JP)

(73) Assignees: Hiroshima University, Higashi-Hiroshima-shi (JP); SUMITOMO CHEMICAL COMPANY, LIMITED, Chuo-ku (JP)

(21) Appl. No.: 18/043,814

(22) PCT Filed: Sep. 3, 2021
(86) PCT No.: PCT/JP2021/032436

§ 371 Date: Mar. 2, 2023

(30) Foreign Application Priority Data
Sep. 4, 2020 (JP) 2020-148944

(51) Int. Cl. C12N 15/10; C12N 9/22; C12N 15/11

(52) U.S. Cl. CPC C12N 15/102; C12N 9/22; C12N 15/11; C12N 2310/20

(57) ABSTRACT

A method for editing a target DNA comprising:
a step of bringing
(1) a fusion protein containing a TALE and a nucleic acid base converting enzyme and
(2) a CRISPR-Cas9 system containing a Cas9 protein which has lost part or all of a nuclease activity and a guide RNA thereof
   into contact with a target DNA to edit a base in a target site of the target DNA by using a nucleic acid base converting enzyme activity of the fusion protein, wherein
   a TALE recognition sequence recognized by the TALE in the fusion protein or a complementary sequence thereof is present on a 5′ side of the target site via a spacer 1 having a chain length of 7 to 31 bp, and
   a guide RNA-target sequence recognized by the guide RNA in the CRISPR-Cas9 system is present to contain a complementary base of the target site.

### TECHNICAL FIELD

[0001] The present invention relates to a method for editing a target DNA, a method for producing a cell in which a target DNA is edited, and a DNA editing system for use in these, and particularly relates to a method for editing a target DNA, a method for producing a cell genome-edited by using the above method, and a combination for use in these.

### BACKGROUND ART

[0002] Since the first report (Komor, A. et al., Nature 533, 420-424 (2016), DOI: 10.1038/nature 17946 (NPL 1)) was made in 2016, base-editing methods in which CRISPR-dCas9/nCas9 and nucleic acid base converting enzymes such as deaminases are combined have rapidly spread because of their high editing efficiency and simplicity with no need of donor DNAs, examples of implementing the methods in various living organisms and cells have been reported, and many improved systems have also been developed (Rees, H. A. and Liu, D. R., Nat Rev Genet 19, 770-788 (2018), DOI: 10.1038/s41576-018-0059-1 (NPL 2) and the like).

[0003] For example, in base editing from base C to T (C→T (G→A)), a system utilizing APOBEC1 of rats (rAPOBEC1) (from BE3 in the above-described firstly published paper, improvement to a system called AncBE4max has been currently proceeded; Koblan, L. et al., Nat Biotechnol 36, 843-846 (2018), DOI: 10.1038/nbt.4172 (NPL 3)), a system utilizing CDA1 of lampreys (PmCDA1) (Target-AID; Nishida, K. et al., Science 353, aaf8729 (2016), DOI: 10.1126/science.aaf8729 (NPL 4)), and the like are often used, and it has been also reported that APOBEC3A, APOBEC3B, and the like can be utilized (Gehrke, J. et al., Nat Biotechnol 36, 977-982 (2018), DOI: 10.1038/nbt.4199 (NPL 5); Martin, A. S. et al., Sci Rep 9, 497 (2019), DOI: 10.1038/s41598-018-36739-9 (NPL 6)). In addition, for example, as a base editing system from base A to G (A→G (T→C)), an Adenine Base Editor (ABE) system that is constructed by engineering TadA protein derived from Escherichia coli has also been reported (Gaudelli, N. et al., Nature 551, 464-471 (2017), DOI: 10.1038/nature24644 (NPL 7)).

[0004] However, in all of these systems, the specificity of target genome regions is dependent only on the PAM sequences recognized by guide RNAs and dCas9/nCas9, which are the components of CRISPR-dCas9/nCas9. Meanwhile, a system in which deaminases are fused to the zinc finger (ZF) or the TAL effector (TALE) has also been reported (Yang, L. et al., Nat Commun 7, 13330 (2016), DOI: 10.1038/ncomms13330 (NPL 8)). However, DNA-binding proteins such as ZF and TALE do not have a property to separate double-stranded DNAs into single-stranded DNAs unlike CRISPR-dCas9/nCas9, the efficiency of the base editing with deaminases using single-stranded DNAs as substrates is significantly low.

[0005] Under such circumstances, a system in which deaminases are split into a N-terminal domain and a C-terminal domain, which are then fused to ZF and nCas9, respectively, so that base editing is only applied when target sequences of both ZF and nCas9 are present in the vicinity has been reported (International Publication No. WO2018/218166). It is considered that using such a system makes it possible to improve the specificity for the addition of the recognition sequence of ZF as compared with the conventional CRISPR-dCas9/nCas9-dependent systems.

### CITATION LIST

### Patent Literature

[0006] [PTL 1] International Publication No. WO2018/218166

### Non Patent Literature

[0007] [NPL 1] Komor, A. et al., Nature 533, 420-424 (2016)
[0008] [NPL 2] Rees, H. A. and Liu, D. R., Nat Rev Genet 19, 770-788 (2018)
[0009] [NPL 3] Koblan, L. et al., Nat Biotechnol 36, 843-846 (2018)
[0010] [NPL 4] Nishida, K. et al., Science 353, aaf8729 (2016)
[0011] [NPL 5] Gehrke, J. et al., Nat Biotechnol 36, 977-982 (2018)
[0012] [NPL 6] Martin, A. S. et al., Sci Rep 9, 497 (2019)
[0013] [NPL 7] Gaudelli, N. et al., Nature 551, 464-471 (2017)
[0014] [NPL 8] Yang, L. et al., Nat Commun 7, 13330 (2016)

### SUMMARY OF INVENTION

### Technical Problem

[0015] However, the efficiency of the base editing using the system described in PTL 1 is, even at most, around ⅓ of the BE3 (NPL 1), which is a conventional base editing system, and it has been considered that this is caused due to a decrease in activity which is caused by splitting.

[0016] The present invention has been made in view of the above-described problems of the conventional techniques, and an object thereof is to provide a method capable of specifically and efficiently editing a target DNA by using a nucleic acid base converting enzyme, a method for producing a cell genome-edited by using the above method, and a DNA editing system for use in these.

### Solution to Problem

[0017] As a result of conducting earnest studies in order to achieve the above-described object, the present inventors have developed a system that fuses a nucleic acid base converting enzyme to TALE without splitting, and binds both of a TALE-nucleic acid base converting enzyme fusion protein (preferably, TALE-deaminase-UGI fusion protein) and a dCas9/guide RNA complex or nCas9/guide RNA complex in the vicinity of a target site of a target DNA. The structure which does not split a nucleic acid base converting enzyme is in compliance with AncBE4max, which is an already reported highly active system in the case a of deaminases, for example. However, since this is not directly linked to dCas9 or nCas9 but is linked to TALE, even when only the TALE-nucleic acid base converting enzyme (deaminase) fusion protein binds to the target DNA, base editing hardly occurs because the single-stranded DNA, which serves as a substrate, is not exposed. In addition, even when only the dCas9/guide RNA complex or only the nCas9/guide RNA complex binds to the target DNA, base editing again does not occur because the nucleic acid base converting enzyme is not present. Hence, the present inventors have found that base editing occurs in the first place when both of the TALE-nucleic acid base converting enzyme fusion protein and the dCas9/guide RNA complex or nCas9/guide RNA complex bind to the target DNA with a specific distance therebetween about the target site, so that high specificity was secured, and high editing efficiency can be achieved because the nucleic acid base converting enzyme is not split.

[0018] In addition, the present inventors have verified that in a combination of the above CRISPR-dCas9 or nCas9 and the TALE-nucleic acid base converting enzyme fusion protein, base editing efficiency similar to that of the conventional AncBE4max system (the maximum activity with reporter assay) can be achieved by studying the spacer 1 between the TALE recognition sequence (or a complementary sequence thereof) and the target site on the target DNA and the position of the RNA target sequence on the target DNA, and have thus completed the present invention. Aspects of the present invention achieved based on the above-described findings are as follows:

[0019] [1]

[0020] A method for editing a target DNA comprising:

[0021] a step of bringing

(1) a fusion protein containing a TALE and a nucleic acid base converting enzyme and
(2) a CRISPR-Cas9 system containing a Cas9 protein which has lost part or all of a nuclease activity and a guide RNA thereof

[0022] into contact with a target DNA to edit a base of a target site of the target DNA by using a nucleic acid base converting enzyme activity of the fusion protein, wherein

[0023] a TALE recognition sequence recognized by the TALE in the fusion protein or a complementary sequence thereof is present on a 5′ side of the target site via a spacer 1 having a chain length of 7 to 31 bp, and

[0024] a guide RNA-target sequence recognized by the guide RNA in the CRISPR-Cas9 system is present to contain a complementary base of the target site.

[0025] [2]

[0026] A method for producing a cell in which a target DNA is edited, comprising:

[0027] a step of introducing or expressing

(1) a fusion protein containing a TALE and a nucleic acid base converting enzyme and
(2) a CRISPR-Cas9 system containing a Cas9 protein which has lost part or all of a nuclease activity and a guide RNA thereof

[0028] into a cell or in a cell to bring the fusion protein and the CRISPR-Cas9 system into contact with a target DNA to edit a base in a target site of the target DNA by using a nucleic acid base converting enzyme activity of the fusion protein, wherein

[0029] a TALE recognition sequence recognized by the TALE in the fusion protein or a complementary sequence thereof is present on a 5′ side of the target site via a spacer 1 having a chain length of 7 to 31 bp, and

[0030] a guide RNA-target sequence recognized by the guide RNA in the CRISPR-Cas9 system is present to contain a complementary base of the target site.

[0031] [3]

[0032] The method according to [1] or [2], wherein

[0033] the fusion protein further contains a linker 1 which binds the TALE and the nucleic acid base converting enzyme.

[0034] [4]

[0035] The method according to any one of [1] to [3], wherein

[0036] the fusion protein further contains a base excision repair inhibitor which is bound to a C-terminal side via a linker 2.

[0037] [5]

[0038] The method according to any one of [1] to [4], wherein

[0039] the nucleic acid base converting enzyme in the fusion protein is a deaminase.

[0040] [6]

[0041] The method according to [5], wherein

[0042] the deaminase is at least one selected from the group consisting of APOBEC, PmCDA1, Anc689, and TadA.

[0043] [7]

[0044] A DNA editing system for use in the method according to any one of [1] to [6], comprising:

(1) a fusion protein containing a TALE and a nucleic acid base converting enzyme; and
(2) a CRISPR-Cas9 system containing a Cas9 protein which has lost part or all of a nuclease activity and a guide RNA thereof.

[0045] [8]

[0046] The DNA editing system according to [7], wherein

[0047] the fusion protein further contains a linker 1 which binds the TALE and the nucleic acid base converting enzyme.

[0048] [9]

[0049] The DNA editing system according to [7] or [8], wherein

[0050] the fusion protein further contains a base excision repair inhibitor which is bound to a C-terminal side via a linker 2.

[0051] [10]

[0052] The method according to any one of [7] to [9], wherein

[0053] the nucleic acid base converting enzyme in the fusion protein is a deaminase.

[0054] [11]

[0055] The DNA editing system according to [10], wherein

[0056] the deaminase is at least one selected from the group consisting of APOBEC, PmCDA1, Anc689, and TadA.

### Advantageous Effects of Invention

[0057] The present invention makes it possible to provide a method capable of specifically and efficiently editing a target DNA by using a nucleic acid base converting enzyme, a method for producing a cell genome-edited by using the method, and a DNA editing system for use in these.

### BRIEF DESCRIPTION OF DRAWINGS

[0058] FIG. 1 is a concept diagram showing the structure of a reporter plasmid.

[0059] FIG. 2 is a concept diagram showing the structure of the sequence from a NheI recognition site to an XhoI recognition site in the reporter plasmid.

[0060] FIG. 3 is a schematic diagram of the structure of a NanoLuc expressing reporter and one aspect of base editing by using a TALE-deaminase.

[0061] FIG. 4 is a concept diagram showing one aspect of the structure of the TALE-deaminase.

[0062] FIG. 5 is a graph showing AncBE4max activity a values obtained in Test 1.

[0063] FIG. 6 is a graph showing TALE-deaminase activity values (proportions to AncBE4max activity values) obtained in Test 2 ((A) WT-104-BE4, (B) 47-104-BE4).

[0064] FIG. 7 is a graph showing TALE-deaminase activity values (proportions to AncBE4max activity values) obtained in Test 2 ((A) WT-104-AID, (B) 63-104-AID, (C) 47-104-AID, (D) WT-12-AID, (E) 63-12-AID, (F) 47-12-AID).

[0065] FIG. 8 is a graph showing TALE-deaminase activity values (proportions to AncBE4max activity values) obtained in Test 3 ((A) WT-104-AID, (B) 63-104-AID, (C) 47-104-AID, (D) WT-12-AID, (E) 63-12-AID, (F) 47-12-AID).

[0066] FIG. 9 is a graph showing relation between TALE-deaminase activity values (proportions to AncBE4max activity values) obtained in Test 4 and the length of the linker 1.

[0067] FIG. 10 is a schematic diagram of the structure of the NanoLuc expressing reporter and one aspect of base editing by using the TALE-deaminase.

[0068] FIG. 11 is concept diagrams showing one aspects (A, B) of the structures of the TALE-deaminases.

[0069] FIG. 12A is a graph showing TALE-deaminase activity values (proportions to AncBE4max activity values) obtained in Test 5 ((A) BE4-TALE-WT: BE4-32-WT, BE4-135-WT, and BE4-234-WT, (B) BE4-TALE-63: BE4-32-63, BE4-135-63, BE4-234-63).

[0070] FIG. 12B is a graph showing TALE-deaminase activity values (proportions to AncBE4max activity values or ABE8e activity values) obtained in Test 5 ((C) BE4-TALE-47: BE4-32-47, BE4-135-47, and BE4-234-47, (D) ABE8e-TALE-47: ABE8e-32-47, ABE8e-135-47, ABE8e-234-47).

[0071] FIG. 13A is concept diagrams showing target regions (AS3 (a), AS14 (b), S2 (a)) on endogenous DNAs (CCR5, HBB), the positions of the TALE recognition sequences, and the positions of complementary sequences of the target sequences of the guide RNA.

[0072] FIG. 13B is concept diagrams showing target regions (AS5 (d), AS14 (e), AS6 (f), AS7 (g)) on endogenous DNAs (CCR5, HBB), the positions of the TALE recognition sequences and complementary sequences thereof, and the positions of complementary sequences of target sequences of the guide RNA.

[0073] FIG. 14 is a graph showing proportions of T at the 1st base (A), the 10th base (B), and the 11th base (C) in the complementary sequences of the target sequences of the guide RNA (sgRNA-AS3), on the target AS3 when TALE-AID was used, which were obtained in Test 6.

[0074] FIG. 15 is a graph showing proportions of T at the 1st base (A), the 5th base (B), and the 6th base (C) in the complementary sequences of the target sequences of the guide RNA (sgRNA-AS14), on the target AS14 when TALE-AID was used, which were obtained in Test 6.

[0075] FIG. 16 is a graph showing proportions of T at the 1st base (A), the 8th base (B), and the 9th base (C) in the complementary sequences of the target sequences of the guide RNA (sgRNA-S2), on the target S2 when TALE-AID was used, which were obtained in Test 6.

[0076] FIG. 17 is a graph showing proportions of T at the 7th base (A) and the 8th base (B) in the complementary sequences of the target sequences of the guide RNA (sgRNA-AS5), on the target AS5 when BE4-TALE was used, which were obtained in Test 6.

[0077] FIG. 18 is a graph showing proportions of T at the 1st base (A), the 5th base (B), and the 6th base (C) in the complementary sequences of the target sequences of the guide RNA (sgRNA-AS14), on the target AS14 when BE4-TALE was used, which were obtained in Test 6.

[0078] FIG. 19 is a graph showing proportions of T at the 5th base (A) and the 6th base (B) in the complementary sequences of the target sequences of the guide RNA (sgRNA-AS6), on the target AS6 when BE4-TALE was used, which were obtained in Test 6.

[0079] FIG. 20 is a graph showing proportions of T at the 6th base (A) and the 7th base (B) in the complementary sequences of the target sequences of the guide RNA (sgRNA-AS7), on the target AS7 when BE4-TALE was used, which were obtained in Test 6.

[0080] FIG. 21 is a graph showing proportions of G at the 3rd base (A) and the 4th base (B) in the complementary sequences of the target sequences of the guide RNA (sgRNA-AS5), on the target AS5 when ABE8e-TALE was used, which were obtained in Test 6.

[0081] FIG. 22 is a graph showing proportions of G at the 4th base (A) and the 7th base (B) in the complementary sequences of the target sequences of the guide RNA (sgRNA-AS6), on the target AS6 when ABE8e-TALE was used, which were obtained in Test 6.

[0082] FIG. 23 is a graph showing proportions of G at the 4th base (A) and the 8th base (B) in the complementary sequences of the target sequences of the guide RNA (sgRNA-AS7), on the target AS7 when ABE8e-TALE was used, which were obtained in Test 6.

### DESCRIPTION OF EMBODIMENTS

[0083] Hereinafter, the present invention is described in more detail by giving a preferred embodiment as an example; however, the present invention is not limited to this.

[0084] <Target DNA Editing Method>

[0085] The target DNA editing method of the present invention is a method for editing a target DNA, comprising:

[0086] a step of bringing

(1) a fusion protein containing a TALE and a nucleic acid base converting enzyme and
(2) a CRISPR-Cas9 system containing a Cas9 protein which has lost part or all of a nuclease activity and a guide RNA thereof

[0087] into contact with a target DNA to edit a base in a target site of the target DNA by using a nucleic acid base converting enzyme activity of the fusion protein, wherein

[0088] a TALE recognition sequence recognized by the TALE in the fusion protein or a complementary sequence thereof is present on a 5′ side of the target site via a spacer 1 having a chain length of 7 to 31 bp, and

[0089] a guide RNA-target sequence recognized by the guide RNA in the CRISPR-Cas9 system is present to contain a complementary base of the target site.

[0090] (Fusion Protein)

[0091] The fusion protein according to the present invention is a fusion protein containing a TALE and a nucleic acid base converting enzyme. In the Specification, the fusion protein according to the present invention is sometimes referred to as a “TALE-nucleic acid base converting enzyme fusion protein” or a “TALE-nucleic acid base converting enzyme”. As the fusion protein, the TALE and the nucleic acid base converting enzyme may be bound in this order, or the nucleic acid base converting enzyme and the TALE may be bound in this order, from the N-terminus. In addition, the fusion protein according to the present invention may contain two or more (preferably, two) nucleic acid base converting enzymes, and in this case, the nucleic acid base converting enzymes may be of one type or may be a combination of two or more types. For example, in the case where the fusion protein according to the present invention contains two nucleic acid base converting enzymes (a first nucleic acid base converting enzyme and a second nucleic acid base converting enzyme), these may be bound in the order of the first nucleic acid base converting enzyme, the TALE, and the second nucleic acid base converting enzyme. Among these, the fusion protein according to the present invention is preferably such that the TALE and the nucleic acid base converting enzyme are bound in this order from the N-terminus or the nucleic acid base converting enzyme and the TALE are bound in this order from the N-terminus.

[0092] [TALE]

[0093] The TALE (Transcription Activator-Like Effector) is a protein which is secreted by proteobacteria in Xanthomonas and activates the gene transcription of the host plant. The “TALE” according to the present invention contains at least an N-terminal domain and a TALE repeat domain, and may further contain a C-terminal domain.

[0094] The TALE repeat domain is composed of multiple, for example 10 to 30, preferably 13 to 25, and more preferably 15 to 20 tandem repeats (TALE repeats) of TALE sequences which form a right-handed superhelix (superhelical). A one unit of typical TALE repeats (one TALE sequence) is composed of 33 to 35 amino acids, and recognizes a specific base of DNA by using a variable residue (repeat variable di-residue: RVD) composed of 12th and 13th, two amino acid residues. Examples of RVDs that specifically recognize bases include HD which recognizes C, NG which recognizes T, NI which recognizes A, NN which recognizes G or A, NS which recognizes A, C, G, or T, and the like. It is possible to create a TALE which can recognize and bind to a desired base sequence (TALE recognition sequence) on DNA by artificially linking a TALE sequence which recognizes a specific base based on the DNA recognition mechanism of the TALE repeat domain.

[0095] The TALE sequence of the TALE according to the present invention may be those obtained by appropriately modifying naturally occurring amino acid sequences as long as the TALE repeat domains of these each can recognize and bind to TALE recognition sequences. For example, in the TALE sequence, the positions of RVDs may each independently be changed, or one or multiple (for example, 10 or less, 9 or less, 8 or less, 7 or less, 6 or less, preferably 5 or less, or 4 or less, further preferably 3 or less or 2 or less) amino acid residues other than the RVDs may be substituted, inserted, and/or deleted. In addition, the 12th and 13th, two amino acid residues of the RVDs may each be substituted with another amino acid residue in order to enhance the specificity to A, T, C, and G.

[0096] In addition, the TALE repeat domain of the TALE according to the present invention is designed to recognize a base sequence or a complementary sequence thereof present on a 5′ side of the target site of the target DNA via a spacer 1 having a chain length of 7 to 31 bp, that is, designed such that a TALE recognition sequence recognized by the TALE or a complementary sequence thereof is a base sequence present on the 5′ side of the target site via a spacer 1 having a chain length of 7 to 31 bp. Techniques for designing and preparing such desired TALEs are known (for example, Miller et al., Nat. Biotechnol., 29, 143-148 (2011); Sakuma et al., Sci. Rep., 3: 3379 (2013)), and a TALE having a high binding activity to the base sequence can be prepared by using a Platinum Gate system described in Sakuma et al. (2013), for example.

[0097] As the N-terminal domain of the TALE according to the present invention, a naturally occurring amino acid sequence (for example, an amino acid sequence of an N-terminal domain contained in pTALETF_v2 (ID: 32185 to 32188) of Addgene) can be used; however, one obtained by appropriately modifying the naturally occurring amino acid sequence may be used as long as it does not exert adverse effects on the functions (the binding capability to the TALE recognition sequence, the editing capability in the target site, and the like) of the fusion protein according to the present invention. For example, one or multiple (for example, 50 or less, 30 or less, 20 or less, 10 or less, 9 or less, 8 or less, 7 or less, 6 or less, preferably 5 or less or 4 or less, further preferably 3 or less or 2 or less) amino acid residues may be substituted, inserted, and/or deleted. In addition, a FLAG-tag for purification and detection, a nuclear localization signal (NLS) for transporting the TALE-nucleic acid base converting enzyme into cell nuclei, and the like may be contained.

[0098] As such N-terminal domain, the chain length of the N-terminal domain is preferably 49 to 287 amino acid residues, more preferably 80 to 200 amino acid residues, and further preferably 120 to 180 amino acid residues. If the chain length of the N-terminal domain is less than the above-described lower limit, the binding to the target DNA tends to be failed, while if the chain length of the N-terminal domain is more than the above-described upper limit, the expression efficiency in the case of expressing a fusion protein tends to decrease.

[0099] Specific examples of the N-terminal domain of the TALE according to the present invention include, for example, an amino acid sequence of an N-terminal domain contained in ptCMV-136/63-VR-HD (ID: 50699) of Addgene and an amino acid sequence of an N-terminal domain contained in ptCMV-153/47-VR-HD (ID: 50703) of Addgene, but the N-terminal domain is not limited to these.

[0100] In the case where the TALE according to the present invention further contains a C-terminal domain, as the C-terminal domain of the TALE, a naturally occurring amino acid sequence (for example, an amino acid sequence of a C-terminal domain contained in pTALETF_v2 (ID: 32185 to 32188) of Addgene) can be used; however, one obtained by appropriately modifying the naturally occurring amino acid sequence may be used as long as it does not exert adverse effects on the functions (the binding capability to the TALE recognition sequence, the editing capability in the target site, and the like) of the fusion protein according to the present invention. For example, one or multiple (for example, 50 or less, 30 or less, 20 or less, 10 or less, 9 or less, 8 or less, 7 or less, 6 or less, preferably 5 or less or 4 or less, further preferably 3 or less or 2 or less) amino acid residues may be substituted, inserted, and/or deleted.

[0101] In the case where the TALE according to the present invention further contains a C-terminal domain, the C-terminal domain of the TALE may be a naturally occurring amino acid sequence in which some amino acid sequences on the C-terminal side are removed. As such C-terminal domain, the chain length of the C-terminal domain is preferably 1 to 180 amino acid residues, more preferably 20 to 100 amino acid residues, and further preferably 40 to 70 amino acid residues. If the chain length of the C-terminal domain is more than the above-described upper limit, the expression efficiency in the case of expressing a fusion protein tends to decrease.

[0102] Specific examples of the C-terminal domain include, for example, an amino acid sequence of a C-terminal domain contained in pTALETF_v2 (ID: 32185 to 32188) of Addgene (WT: the number of amino acids=180), an amino acid sequence of a C-terminal domain contained in pTALEN_v2 (ID: 32189 to 32192) of Addgene (the number of amino acids=63), and an amino acid sequence of a C-terminal domain contained in ptCMV-153/47-VR-NG (ID: 50704) of Addgene (the number of amino acids=47), but the C-terminal domain is not limited to these.

[0103] [Nucleic Acid Base Converting Enzyme]

[0104] In the present invention, the nucleic acid base converting enzyme means an enzyme capable of converting a target nucleotide to another nucleotide or omitting the target nucleotide without cleaving the DNA strand by catalyzing a reaction for converting a substituent on a purine or pyrimidine ring on a DNA base to another group or atom or omitting the substituent.

[0105] Such nucleic acid base converting enzyme is not particularly limited as long as it is capable of catalyzing the above-described reaction, and includes, for example, deaminases and glycosylases, and may be only one of these or two or more of these in combination. Among these, a deaminase is preferable as the nucleic acid base converting enzyme according to the present invention.

[0106] (Deaminase)

[0107] The deaminase is an enzyme which catalyzes deamination reaction of converting an amino group of abase to a carbonyl group, and belongs to the nucleic acid/nucleotide deaminase super family. Such deaminase includes cytidine deaminases which can convert cytosine or 5-methylcytosine to uracil or thymine, respectively, adenosine deaminases which can convert adenine to hypoxanthine, and guanosine deaminases which can convert guanine to xanthine, and a desired deaminase can be used depending on the target base substitution.

[0108] The source of the deaminase is not particularly limited, and includes, for example, lampreys; and mammals such as human, monkey, pig, cattle, horse, rat, and mouse.

[0109] As such deaminase, cytidine deaminases include, for example, APOBEC (rAPOBEC1 derived from rat, hAPOBEC1, hAPOBEC2, hAPOBEC3 (hAPOBEC3A, 3B, 3C, 3D (3E), 3F, 3G, 3H), and hAPOBEC4 derived from human, and the like); Anc689, which is an ancestral amino acid sequence of APOBEC; AID (activation-induced cytidine deaminase (AICDA), which is derived from mammals (examples: human, pig, cattle, horse, monkey, and the like)); and PmCDA1 (Petromyzon marinus cytosine deaminase 1), which is in the family of AID and derived from lampreys. In addition, adenosine deaminases include, for example, TadA, which is derived from E. coli. Each of the above-described deaminases includes modifications thereof (for example, TadA-8e, TadA7.10, and further, modifications of these, and the like). Among these, the deaminase is preferably at least one selected from the group consisting of APOBEC, PmCDA1, Anc689, and TadA (including modifications of these).

[0110] In addition, in the case where the fusion protein according to the present invention contains two or more deaminases, the combination of these can be selected as appropriate depending on the target base substitution, and includes, for example, a combination of the same or different cytidine deaminases, a combination of the same or different adenosine deaminases, the same or different guanosine deaminases, a combination of a cytidine deaminase and an adenosine deaminase, a combination of a cytidine deaminase and a guanosine deaminase, and a combination of an adenosine deaminase and a guanosine deaminase. Among these, the combination of deaminases is preferably a combination of TadA and PmCDA1. Note that base sequences and amino acid sequences of these deaminases are known, and can be acquired from a known public database (Genbank or the like).

[0111] In addition, the deaminase may be one with modification (for example, substitution, insertion, and/or deletion of the amino acid residue) made based on the base sequences and amino acid sequences of these known deaminases as long as it has the deamination activity (deaminase activity). The presence or absence of the deaminase activity can be checked by using a known method as appropriate. For example, in the case of a cytidine deaminase, the presence or absence of the deaminase activity can be checked by conducting an enzyme reaction using cytidine as a substrate to detect and quantify uridine, which is a metabolite of cytidine.

[0112] [Linker 1]

[0113] It is preferable that the fusion protein according to the present invention further contain a linker 1. In this case, in the fusion protein according to the present invention, TALE and the nucleic acid base converting enzyme are linked by the linker 1. In addition, in the case where the fusion protein according to the present invention contains multiple nucleic acid base converting enzymes, it is preferable that multiple linkers 1 be correspondingly present. In the case where the fusion protein according to the present invention contain multiple linkers 1, these may be of only one type, or may be of two or more types in combination.

[0114] In the case where the fusion protein according to the present invention further contains a linker 1, the chain length of the linker 1 is not particularly limited, but is preferably 1 to 450 amino acid residues, more preferably 5 to 250 amino acid residues, more preferably 5 to 200 amino acid residues, more preferably 12 to 150 amino acid residues, and further preferably 12 to 104 amino acid residues. If the chain length of the linker 1 is more than the upper limit, the expression efficiency in the case of expressing a fusion protein tends to decrease.

[0115] The linker 1 according to the present invention includes, for example, 12 amino acids described in Yang L et al., Nat Commun 7 13330 (2016), 104 amino acids described in Nishida, K. et al., Science 353, aaf8729 (2016), 32 amino acids described in Koblan, L. et al., Nat Biotechnol 36, p. 843-846 (2018), HTS95 amino acid sequence (95 amino acids) described in Sun, N. and Zhao, H., Mol BioSyst 10, p. 446-453 (2014), Doi: 10.1039/c3mb70412b) and repeats of these, but is not limited to these.

[0116] In addition, as the fusion protein of the present invention, in the case where the nucleic acid base converting enzyme is located on the C-terminal side of TALE, it is preferable that the TALE repeat domain and the nucleic acid base converting enzyme be separated away by 1 to 630 amino acid residues. For this reason, it is preferable that the fusion protein of the present invention contain at least one of C-terminal domains of the TALE and linkers 1. The chain length between the TALE repeat domain and the nucleic acid base converting enzyme in this case (the number of amino acid residues up to the residue adjacent to the N-terminal side of the N terminus of the nucleic acid base converting enzyme counted as the amino acid residue adjacent to the C-terminal side of the C terminus of the TALE repeat domain is deemed as the 1st residue) is more preferably 25 to 300 amino acid residues, and further preferably 52 to 174 amino acid residues. If the chain length is less than the above-described lower limit, the efficiency of base editing tends to decrease, while if the chain length is more than the above-described upper limit, the expression efficiency in the case of expressing a fusion protein tends to decrease.

[0117] Note that the residue at the C terminus of the TALE repeat domain may be the residue at the C terminus of the TALE sequence (preferably 1 unit: 33 to 35 amino acids) located immediately before (on N-terminal side of) a truncated last half-repeat (LHR) located on the C-terminal side of the TALE repeat domain (in the case where there is no LHR, the residue at the C terminus of the last TALE sequence (preferably 1 unit: 33 to 35 amino acids) contained in the TALE repeat domain). In addition, the residue at the N terminus of the nucleic acid base converting enzyme may be the initial residue (normally methionine) of the amino acid sequence having an identity of 85% or more (preferably 90% or more) to the amino acid sequence of a typical nucleic acid base converting enzyme which can be acquired from a known database (for example, NCBI) in accordance with a homology search using a known method (for example, BLAST (NCBI)).

[0118] [Base Excision Repair Inhibitor, Linker 2]

[0119] It is preferable that the fusion protein according to the present invention further contain a base excision repair inhibitor bound via a linker 2 on the C-terminal side, that is, at the C-terminus of the nucleic acid base converting enzyme (in the case where the nucleic acid base converting enzyme is located on the C-terminal side of the TALE) or the C-terminus of the TALE (in the case where the nucleic acid base converting enzyme is located only on the N-terminal side of the TALE). In the case where the fusion protein further contains abase excision repair inhibitor, the number of the base excision repair inhibitor may be one or two or more (preferably two) via the linker 2 per fusion protein. In addition, in the case where there are two or more base excision repair inhibitors, the base excision repair inhibitors may be of only one type or may be of two or more types in combination, but are preferably of one type.

[0120] The base excision repair inhibitors according to the present invention are not particularly limited as long as they inhibit base excision repair, but DNA glycosylase inhibitors are preferable. The DNA glycosylase inhibitors include thymine-DNA glycosylase inhibitors, uracil-DNA glycosylase inhibitors, oxoguanine-DNA glycosylase inhibitors, and alkylguanine-DNA glycosylase inhibitors. For example, in the case of using a cytidine deaminase, which is a deaminase, as the nucleic acid base converting enzyme, it is appropriate to use the uracil-DNA glycosylase inhibitor (UGI) for inhibiting repair of U:G or G:U mismatch of DNA caused by mutation. In this case, when the deaminase and UGI are present on a single polypeptide, the efficiency of base editing is further improved.

[0121] Such an uracil-DNA glycosylase inhibitor includes, for example, an uracil-DNA glycosylase inhibitor (UGI) derived from PBS-1, which is Bacillus subtilis bacteriophage, or an uracil-DNA glycosylase inhibitor (UGI) derived from PBS-2, which is Bacillus subtilis bacteriophage, but is not limited to these. The base sequences and amino acid sequences of these are known and can be acquired from a public database (Genbank or the like). In addition, the base excision repair inhibitor according to the present invention may be one with modification (for example, in which substitution, insertion, and/or deletion of amino acid residues is introduced) made based on the base sequence and amino acid sequence of a known base excision repair inhibitor as long as it has repair inhibitory activity on the above-described mismatches of DNA.

[0122] In the case where the fusion protein according to the present invention further contains the base excision repair inhibitors and there are multiple base excision repair inhibitors, the base excision repair inhibitors can be linked via the linkers 2 in such a manner of the fusion protein—the linker 2—the first base excision repair inhibitor—the linker 2—the second base excision repair inhibitor . . . . The multiple linkers 2 in this case may be of only one type or of two or more types in combination, but are preferably of one type.

[0123] Such a linker 2 is not particularly limited, but the chain length of the linker 2 is preferably 1 to 50 amino acid residues, more preferably 5 to 30 amino acid residues, and further preferably 8 to 15 amino acid residues. If the chain length of the linker 2 is less than the lower limit, the functionality of the base excision repair inhibitor tends to decrease, while if the chain length of the linker 2 is more than the upper limit, the expression efficiency in the case of expressing a fusion protein tends to decrease.

[0124] The linker 2 according to the present invention includes, for example, 10 amino acids described in pCMV_AncBE4max_P2A_GFP (ID: 112100) of Addgene, but is not limited to this.

[0125] [Others]

[0126] The fusion protein according to the present invention may further contain a FLAG-tag for purification or detection, a nuclear localization signal (NLS) for transporting the TALE-nucleic acid base converting enzyme into cell nucleus, and the like at the N-terminus and/or C-terminus, and these may be contained in the N-terminal domain of the TALE as described above, or may be added to the N-terminus and/or C-terminus of the fusion protein.

[0127] The fusion protein according to the present invention can be obtained, for example, by transcribing expressing genes encoding the above-described TALE and nucleic acid base converting enzyme, as well as the linker 1, the base excision repair inhibitor, the linker 2, and other amino acids as necessary in an integrated manner. In addition, the fusion protein according to the present invention can be produced by employing and modifying a conventionally known method as appropriate, and can be obtained, for example, by a method that chemically synthesizes the fusion protein by using a commercially-available synthesizer based on the amino acid sequence, or a method that expresses the fusion protein by introducing a polynucleotide encoding the fusion protein or a vector expressing the fusion protein into the cell, as described in the method for producing a cell in which a target DNA is edited described below.

[0128] (CRISPR-Cas9 system)

[0129] The CRISPR-Cas9 system according to the present invention contains a Cas9 protein which has lost part or all of a nuclease activity and a guide RNA thereof.

[0130] [Cas9 Protein]

[0131] In the CRISPR-Cas9 system according to the present invention, the Cas9 protein needs to be a Cas9 protein which has lost part of the nuclease activity (referred to as “nCas9” in the Specification) or a Cas9 protein which has lost all of the nuclease activity (referred to as “dCas9” in the Specification). In other words, Cas9 proteins typically contain a domain (RuvC domain) involved in cleavage of target strands and a domain (HNH domain) involved in cleavage of non-target strands. The Cas9 protein according to the present invention needs to have lost the nuclease activity of at least one of the domains due to introduction of mutation or the like.

[0132] In the case of SpCas9 protein (Cas9 protein derived from S. pyogenes), such mutation includes, for example, mutation into alanine of the 10th amino acid (aspartic acid) from the N terminus (D10A: mutation in the RuvC domain), mutation into alanine of the 840th amino acid (histidine) from the N terminus (H840A: mutation in the HNH domain), mutation into alanine of the 863rd amino acid (asparagine) from the N terminus (N863A: mutation in the HNH domain), mutation into alanine of the 762nd amino acid (glutamic acid) from the N terminus (E762A: mutation in the RuvCII domain), and mutation into alanine of the 986th amino acid (aspartic acid) from the N terminus (D986A: mutation in the RuvCIII domain). Besides, Cas9 proteins derived from various sources are known (for example, WO2014/131833), and any of these nCas9 and dCas9 can be used, but the Cas9 protein is not limited to these.

[0133] Note that the amino acid sequences and base sequences of Cas9 proteins are registered in a public database, for example, Genbank (http://www.ncbi.nlm.nih.gov) (for example, accession number: KX151730.1 and the like), and these can be used in the present invention. In addition, in the Cas9 protein, further mutation, for example, mutation for modifying the recognition of PAM sequences may be introduced (Benjamin, P. et al., Nature 523, 481-485 (2015); Hirano, S. et al., Molecular Cell 61, 886-894 (2016)), and further a nuclear localization signal (NLS) for transporting into cell nuclei and the like may be added. In addition, such Cas9 protein may be any of those which are encoded in sequences contained in commercially-available plasmids.

[0134] Regarding the Cas9 protein in the CRISPR-Cas9 system, a guide RNA described below is designed such that the guide RNA-target sequence contains the complementary base of the target site of the target DNA. Note that in the present invention, the complementary base of the target site of the target DNA refers to a complementary base of one base of the target site on a complementary strand of the strand where the target site is present. In this way, the target site is specifically exposed by the helicase activity, which exposes a single-stranded DNA, in the target DNA, which is a double-strand, to improve the editing efficiency by using the nucleic acid base converting enzyme.

[0135] [Guide RNA]

[0136] In the CRISPR-Cas9 system according to the present invention, the guide RNA is a combination of crRNA (CRISPR RNA) containing a base sequence (hereinafter, sometimes referred to as a “targeting base sequence”) complementary to a sequence (guide RNA-target sequence) on the target DNA and tracrRNA (trans-activating crRNA). The crRNA further contains a base sequence capable of interacting (hybridizing) with the tracrRNA on the 3′ side. On the other hand, the tracrRNA contains a base sequence capable of interacting (hybridizing) with the base sequence of part of the crRNA on the 5′ side, the guide RNA forms double-stranded RNA which interacts with the Cas9 protein through the interaction of these base sequences. Hence, the guide RNA recognizes and binds to the guide RNA-target sequence of the target DNA, and guides the Cas9 protein, which forms a complex with the guide RNA, to the target DNA, and the Cas9 protein thus guided exposes the single-stranded DNA in the target site of the target DNA through its helicase activity.

[0137] The guide RNA of the CRISPR-Cas9 system according to the present invention may be a single guide RNA (sgRNA) containing crRNA and tracrRNA or may be a dual guide RNA composed of a crRNA fragment and a tracrRNA fragment.

[0138] In the target DNA, the editing of a base of the target site takes place at a position that is determined by the complementation of base-pair formation between the targeting base sequence of the guide RNA and the guide RNA-target sequence and a PAM sequence present on the 3′ side of a complementary strand of the guide RNA-target sequence. The guide RNA of the CRISPR-Cas9 system according to the present invention is designed such that the guide RNA-target sequence becomes a sequence containing a complementary base of the target site, and the Cas9 protein can recognize the PAM sequence on the 3′ side of the target site. In this way, the target site is specifically exposed by the helicase activity, which exposes a single-stranded DNA, in the target DNA, which is a double-strand, to improve the editing efficiency by using the nucleic acid base converting enzyme.

[0139] As the method for designing a PAM sequence and a guide RNA-target sequence of a Cas9 protein, various methods have been known, and the design may be determined by using, for example, E-CRISP (http://www.e-crisp.org/E-CRISP/), Zifit Targeter (http://zifit.partners.org/ZiFiT/) (Zing Finger consortium), CRISPR direct (http://crispr.dbcls.jp/) (University of Tokyo), CRISPR-P (http://cbi.hzau.edu.cn/crispr/) (Huazhong Agricultural University), Guide RNA Target Design Tool. (https://wwws.blueheronbio.com/external/tools/g RNA Src.jsp) (Blue Heron Biotech), and the like.

[0140] The CRISPR-Cas9 system according to the present invention can be obtained, for example, by simultaneously transcribing expressing genes encoding the above-described Cas9 protein and guide RNA, respectively, as described in the method for producing a cell in which a target DNA is edited described below. The Cas9 protein and the guide RNA according to the present invention can be produced by employing and modifying conventionally known methods as appropriate, and can be obtained, for example, by a method that introduces polynucleotides encoding these or an expression vector containing polynucleotides into the cell.

[0141] (Target DNA)

[0142] In the present invention, a DNA containing a target site to be subjected to objective DNA editing is referred to as a “target DNA”. The target DNA according to the present invention is a double-stranded DNA, and in order to indicate correspondence with the above-described fusion protein and CRISPR-Cas9 system, it is assumed that at least one strand has a structure containing the TALE recognition sequence or a complementary sequence thereof, the spacer 1, the target site, and the PAM sequence in this order from the 5′ side for the sake of convenience. Containing a complementary sequence of the TALE recognition sequence on the 5′ side means that a complementary strand of the above strand contains the TALE recognition sequence. That is, the TALE recognition sequence may be set on the same strand as the target site or may be set on a complementary strand thereof. In addition, a complementary strand of the above strand is assumed to contain the guide RNA-target sequence so as to contain a complementary base of the target site. An example of the configuration of the target DNA according to the present invention is shown in FIG. 2, but the configuration is not limited to this.

[0143] The target site according to the present invention refers to one base to be edited by the nucleic acid base converting enzyme (preferably, deaminated by a deaminase). However, this does not exclude cases where bases in the vicinity of either side of the one base (particularly, in a case where there is abase to be deaminated by a deaminase. preferably 1 to 10 bases, more preferably 1 to 5 bases, and further preferably 1 to 2 bases on each of the 5′ side and 3′ side) are further edited (deaminated in the case of a deaminase).

[0144] The TALE recognition sequence is a sequence recognized by the above TALE. The number of bases of the TALE recognition sequence is 10 to 30 bases, preferably 13 to 25 bases, and more preferably 15 to 20 bases. The TALE recognition sequence is selected to be present on the 5′ side of the target site via a spacer 1 having a chain length of 7 to 31 bp. When the chain length of the spacer 1 is within the above range, it is possible to specifically and highly efficiently deaminate one base of the target site. The chain length of the spacer 1 is a length from a base adjacent to the 5′ side of the base of the target site as the first base to a base adjacent to the 3′ side of the TALE recognition sequence. The chain length of the spacer 1 is more preferably 10 to 31 bp, further preferably 10 to 28 bp, and even more preferably 13 to 25 bp.

[0145] The PAM sequence is a sequence recognized by the above Cas9 protein. The PAM sequence varies depending on the type of the Cas9 protein used. As typical PAM sequences, for example, a PAM sequence corresponding to the Cas9 protein (type II) derived from S. pyogenes is 5′-NGG, a PAM sequence corresponding to the Cas9 protein (type I-A1) derived from S. solfataricus is 5′-CCN, a PAM sequence corresponding to the Cas9 protein (type I-A2) derived from S. solfataricus is 5′-TCN, a PAM sequence corresponding to the Cas9 protein (type I-B) derived from H. walsbyl is 5′-TTC, a PAM sequence corresponding to the Cas9 protein (type I-E) derived from E. coli is 5′-AWG, a PAM sequence corresponding to the Cas9 protein (type I-F) derived from E. coli is 5′-CC, a PAM sequence corresponding to the Cas9 protein (type I-F) derived from P. aeruginosa is 5′-CC, a PAM sequence corresponding to the Cas9 protein (type II-A) derived from S. thermophilus is 5′-NNAGAA, a PAM sequence corresponding to the Cas9 protein (type II-A) derived from S. agalactiae is 5′-NGG, a PAM sequence corresponding to the Cas9 protein derived from S. aureus is 5′-NGRRT or 5′-NGRRN, a PAM sequence corresponding to the Cas9 protein derived from N. meningitidis is 5′-NNNNGATT, and a PAM sequence corresponding to the Cas9 protein derived from T. denticola is 5′-NAAAAC. Note that as described above, it is also possible to modify the PAM recognition by modifying the Cas9 protein (for example, through introduction of mutation). This makes it possible to expand the options for the target site.

[0146] In the present invention, the PAM sequence is present on the 3′ side of the target site, and the guide RNA-target sequence recognized by the guide RNA is determined depending on the position of the PAM sequence. In the present invention, the position of the complementary base of the target site in the guide RNA-target sequence is not particularly limited, but for example, is preferably between the 1st position and the 50th position, more preferably between the 1st position and the 30th position, and further preferably between the 1st position and the 25th position. Note that the position of the base in the guide RNA-target sequence is a position up to the complementary base of the base adjacent to the 5′ side of the PAM sequence, where the position of the base at the 3′ terminus of the guide RNA-target sequence is deemed as the 1st position. The upper limit and the lower limit for the position of the base depend on the length of the guide RNA-target sequence and can be adjusted by adjusting the length of the guide RNA.

[0147] The guide RNA-target sequence recognized by the guide RNA is selected to be a sequence containing the complementary base of the target site. By selecting the position of the guide RNA-target sequence in this way, it is possible to specifically and highly efficiently edit one base of the target site. The number of bases of the guide RNA-target sequence according to the present invention is preferably 12 to 50 base, more preferably 17 to 30 base, and further preferably 17 to 25 base.

[0148] The base sequence of such target DNA is not particularly limited, and the target for the DNA editing method of the present invention can be obtained by designing the targeting base sequences of the TALE and the guide RNA and modifying the recognition specificity of the PAM as necessary, so that the TALE recognition sequence or a complementary sequence thereof, the spacer 1, the complementary sequence of the guide RNA-target sequence, the target site contained in the complementary sequence, and the PAM sequence satisfy the above-described conditions.

[0149] Moreover, the target DNA according to the present invention may be a DNA present inside a cell (internal DNA) or a DNA present outside a cell depending on the object. The DNA present inside a cell may be an endogenous DNA or may be an exogenous DNA. The endogenous DNA includes genomic DNAs, and the exogenous DNA includes, for example, DNAs introduced in cells. The DNA present outside a cell may be a DNA derived from a cell or may be a DNA amplified or synthesized outside a cell.

[0150] (Target DNA Editing Method)

[0151] In the target DNA editing method of the present invention, the fusion protein and the CRISPR-Cas9 system are brought into contact with the target DNA to edit the base in the target site of the target DNA by using the nucleic acid base converting enzyme activity of the fusion protein.

[0152] Once the fusion protein and the CRISPR-Cas9 system are brought into contact with the target DNA, the TALE of the fusion protein recognizes and binds to the TALE recognition sequence on the target DNA, and guides the nucleic acid base converting enzyme linked to the TALE to the target DNA. On the other hand, the guide RNA of the CRISPR-Cas9 system recognizes and binds to the guide RNA-target sequence on the target DNA, and guides the Cas9 protein, which forms a complex with the guide RNA, to the target DNA. In this way, since the Cas9 protein exposes the single-stranded DNA through the helicase activity in the target site, it is possible to efficiently cause substitution of the objective base (for example, deamination of the base) by using the nucleic acid base converting enzyme. In this way, substitution of one base occurs in the target site (for example, C→U), and also for example, in the cell, the base of the strand opposite to the strand where the substitution has occurred is repaired to form a pair with the substituted base due to mismatch of the double-stranded DNA (for example, G→A), or the base is substituted with another nucleotide during the repair (for example, U→A, G), or deletion or insertion of one base or several tens of bases occurs, so that various mutations can be introduced.

[0153] Hence, the editing of DNA according to the present invention includes deletion of one or more nucleotides, substitution with other one or more nucleotides, or insertion of one or more nucleotides, or combinations of these mutations, in the target site converted by the nucleic acid base converting enzyme and the vicinity including the target site.

[0154] The target DNA editing method of the present invention may be conducted inside of a cell or may be conducted in a cell-free system. The “inside of a cell” where the target DNA editing method of the present invention is conducted may be inside of eukaryotic cell or may be inside of a prokaryotic cell, and is preferably inside of an eukaryotic cell. The eukaryotic cell includes, for example, animal cells (cells of mammals, fishes, birds, reptiles, amphibians, insects, and the like), plant cells, algal cells, and yeast. The prokaryotic cell includes, for example, E. coli, Salmonella, Bacillus subtilis, Lactobacillus, and extreme thermophiles.

[0155] The “animal cells” include, for example, cells forming individuals of animals, cells forming organs tissues extirpated from animals, cultured cells derived from tissues of animals, and the like. Specifically, the “animal cells” include, for example, germ cells such as oocytes and sperm; embryonic cells of embryos at various stages (for example, 1-cell embryos, 2-cell embryos, 4-cell embryos, 8-cell embryos, 16-cell embryo, morula embryos, and the like); stem cells such as induced pluripotent stem (iPS) cells and embryonic stem (ES) cells; somatic cells such as fibroblasts, hematopoietic cells, neurons, muscle cells, bone cells, liver cells, pancreatic cells, brain cells, and kidney cells, and the like. As oocytes for use in preparation of genome-edited animals, oocyte before fertilization and after fertilization can be used, but oocytes after fertilization, that is, fertilized eggs are preferable. Particularly preferably, fertilized eggs are from pronuclear stage embryos. As oocytes, cryopreserved oocytes can be thawed and used.

[0156] The “plant cells” include, for example, cells forming individuals of plants, cell forming organs and tissues separated from plants, cultured cells derived from tissues of plants, and the like. Organs and tissues of plants include, for example, leaves, stems, shoot apexes (growing points), roots, tubers, calluses, and the like.

[0157] In addition, the “cell-free system” in which the target DNA editing method of the present invention is conducted refers to a system in which there is no living cells (the eukaryotic cells, prokaryotic cells). The cell-free system according to the present invention is not particularly limited as long as it is a system in which the fusion protein and the CRISPR-Cas9 system can be brought into contact with the target DNA, but includes, for example, insides of buffer solutions; insides of cell lysates and insides of cell extracts of the eukaryotic cell or prokaryotic cell, and the like.

[0158] The method for bringing the fusion protein and the CRISPR-Cas9 system into contact with the target DNA is not particularly limited. In the case of the inside of a cell, there is, for example, a method including: introducing a vector or the like that introduces the fusion protein and the CRISPR-Cas9 system into the cell or encodes these into a cell containing the target DNA to express these, as a method for producing a cell in which a target DNA is edited described below. In the case of the cell-free system, for example, a solution of the target DNA and a solution of the fusion protein and the CRISPR-Cas9 system may be mixed. A solvent for these solutions is not particularly limited, but for example, a buffer solution such as a phosphate buffer solution, a Tris buffer solution, a Good's buffer solution, or a boric acid buffer solution is preferable.

[0159] <Method for Producing Cell in which Target DNA is Edited>

[0160] The method for producing a cell in which a target DNA is edited of the present invention is a method for producing a cell in which a target DNA is edited, comprising:

[0161] a step of introducing or expressing

(1) a fusion protein containing a TALE and a nucleic acid base converting enzyme and
(2) a CRISPR-Cas9 system containing a Cas9 protein which has lost part or all of a nuclease activity and a guide RNA thereof

[0162] into a cell or in a cell to bring the fusion protein and the CRISPR-Cas9 system into contact with a target DNA to edit a base in a target site of the target DNA by using a nucleic acid base converting enzyme activity of the fusion protein, wherein

[0163] a TALE recognition sequence recognized by the TALE in the fusion protein or a complementary sequence thereof is present on a 5′ side of the target site via a spacer 1 having a chain length of 7 to 31 bp, and

[0164] a guide RNA-target sequence recognized by the guide RNA in the CRISPR-Cas9 system is present to contain a complementary base of the target site.

[0165] In the method for producing a cell in which a target DNA is edited (hereinafter, sometimes referred to simply as the “production method”) of the present invention, the fusion protein, the CRISPR-Cas9 system, and the target DNA are as described in the above-described target DNA editing method of the present invention. The target DNA in the production method of the present invention is a genomic DNA, and the fusion protein and the CRISPR-Cas9 system can be designed depending on the objective of the editing of the genomic DNA.

[0166] In addition, in the production method of the present invention, the fusion protein and the CRISPR-Cas9 system are brought into contact with the target DNA in a cell by introducing the fusion protein and the CRISPR-Cas9 system into the cell in the form of protein, introducing the fusion protein and the CRISPR-Cas9 system into the cell in the form of polynucleotide, and/or introducing the fusion protein and the CRISPR-Cas9 system into the cell in the form of polynucleotide or introducing the fusion protein and the CRISPR-Cas9 system using expression vectors to express the fusion protein and the CRISPR-Cas9 system in the cell. Hence, as the fusion protein and the CRISPR-Cas9 system, the fusion protein and the Cas9 protein may be each independently introduced into a cell in the form of protein, or introduced into the cell in the form of RNA or DNA (polynucleotide) encoding the protein and expressed in the cell, or introduced into the cell in the form of vector (expression vector) expressing the protein and expressed in the cell. In addition, separately from this, the guide RNA may be introduced into the cell in the form of RNA, or introduced into the cell in the form of DNA (polynucleotide) encoding the RNA and expressed in the cell, or introduced into the cell in the form of vector (expression vector) expressing the RNA and expressed in the cell.

[0167] In the case where the fusion protein and the CRISPR-Cas9 system are introduced into a cell in the form of expression vector and expressed in the cell, for example, a vector expressing the fusion protein, a vector expressing the Cas9 protein, and a vector expressing the guide RNA each may be introduced into the cell, or a vector expressing two or more of these in combination may be introduced into the cell.

[0168] In addition, in the case where the fusion protein and the CRISPR-Cas9 system are introduced into a cell in the form of expression vector and expressed in the cell, polynucleotides encoding the fusion protein and the Cas9 protein may be each independently codon-optimized depending on the cell to introduce them. In addition, the expression vectors preferably contain a promoter and/or another control sequence operably linked to the polynucleotides to be expressed. Moreover, it is preferable that the expression vectors be capable of stably expressing proteins to be encoded without being incorporated in the host genome. Such expression vectors can be prepared in accordance with a conventionally known method as appropriate.

[0169] As the method for introducing proteins of the fusion protein and the CRISPR-Cas9 system, polynucleotides encoding the proteins, or vectors expressing the proteins into a cell, a known method for introducing proteins, DNA, or RNA fragments into a cell can be employed as appropriate depending on the type of the cell. Such method includes, for example, the electroporation method, the microinjection method, the particle gun method, the calcium phosphate method, the polyethyleneimine (PEI) method, the liposome method (the lipofection method), the DEAE-dextran method, cationic lipid-mediated transfection, viruses (adenovirus, lentivirus, adeno-associated virus, baculovirus, and the like), the agrobacterium method, the lithium acetate method, the spheroplast method, the heat shock method (the calcium chloride method, the rubidium chloride method), and the like. Such methods are described in many standard laboratory manuals such as “Leonard G. Davis et al., Basic methods in molecular biology, New York: Elsevier, 1986”.

[0170] Once the fusion protein and the CRISPR-Cas9 system are introduced into a cell or expressed in the cell, the fusion protein and the CRISPR-Cas9 system come into contact with the target DNA in the cell, base substitution of the objective one base is caused in the target site by the target DNA editing mentioned in the above-described target DNA editing method of the present invention, and as a result a cell in which the target DNA is edited can be obtained.

[0171] The present invention also provides a method for preparing a non-human individual containing a cell in which the target DNA is edited. This method comprises a step of preparing a non-human individual from a cell obtained by the above-described production method. The non-human individual includes, for example, non-human animals and plants. The non-human animals include mammals (mice, rats, guinea pigs, hamsters, rabbits, monkeys, pigs, cattle, goats, sheep, and the like), fishes, birds, reptiles, amphibians, and insects. In the case of preparing a model animal, the mammal is preferably a rodent such as a mouse, a rat, a guinea pig, and a hamster, and is particularly preferably a mouse. The plants include, for example, grains, oil crops, forage crops, fruits, and vegetables. Specific examples of crops include, for example, rice, corn, banana, peanut, sunflower, tomato, turnip rape, tobacco, wheat, barley, potato, soybean, cotton plant, and carnation.

[0172] As the method for preparing a non-human individual from a cell in which the target DNA is edited, a known method can be used. In the case of preparing a non-human individual from a cell in an animal, a germ cell or a pluripotent stem cell is normally used. For example, an offspring can be obtained by microinjecting the fusion protein and the CRISPR-Cas9 system into an oocyte, and transplanting the oocyte thus obtained into uterus of a female non-human mammal brought into a pseudopregnancy state. In addition, in the case of plants, it has been known that the somatic cells have totipotency since a long time ago. For example, a plant in which desired DNA is edited can be obtained by microinjecting the fusion protein and the CRISPR-Cas9 system into a plant cell, and reproducing the plant from the plant cell thus obtained. In addition, it is also possible to obtain progeny or clones in which a desired DNA is edited from the non-human individual thus obtained.

[0173] The checking of the presence or absence of the target DNA editing and the determination of the genotype can be conducted based on conventionally known methods, and for example, the PCR method, the sequence determination method, the Southern blotting method, and the like can be used.

[0174] <DNA Editing System>

[0175] In addition, the present invention provides a DNA editing system comprising:

(1) a fusion protein containing a TALE and a nucleic acid base converting enzyme; and
(2) a CRISPR-Cas9 system containing a Cas9 protein which has lost part or all of a nuclease activity and a guide RNA thereof, for use in the above-described target DNA editing method of the present invention, the above-described method for producing a cell in which a target DNA is edited of the present invention, or the above-described method for preparing a non-human individual of the present invention.

[0176] The fusion protein and the CRISPR-Cas9 system are as mentioned in the above-described target DNA editing method and production method of the present invention. These may be each independently in the form of protein or RNA, or in the form of polynucleotide encoding the protein or RNA, or in the form of vector (expression vector) expressing the protein or RNA.

[0177] In the case of the form of vector, the present invention provides a DNA editing system comprising
[0178] (a) a vector containing an insertion site of a polynucleotide encoding TALE and a polynucleotide encoding a portion other than the TALE of the fusion protein;
[0179] (b) a polynucleotide encoding a Cas9 protein which has lost part or all of a nuclease activity, or a vector containing the polynucleotide; and
[0180] (c) a polynucleotide encoding a guide RNA of the Cas9 protein, or a vector containing the polynucleotide, or a vector containing an insertion site of the polynucleotide, in order for the user to be capable of designing the fusion protein and the CRISPR-Cas9 system depending on the target site of the target DNA. Note that each of the vectors of (a) to (c) contains an expression unit which enables each corresponding polynucleotide to be expressed.

[0181] The DNA editing system of the present invention may be a combination product composed of a combination of the fusion protein and the CRISPR-Cas9 system, or a kit comprising the combination. In the case of a kit, the kit may further comprise one or multiple additional reagents. Such additional reagents include, for example, a diluted buffer solution, a reconstitution solution, a wash buffer solution, a nucleic acid transfection reagent, a protein transfection reagent, a control reagent (for example, control deaminase), but are not limited to these. In addition, the kit may further comprise an instruction manual for implementing the methods of the present invention.

[0182] The elements included in the kit may be stored respectively in separate containers, or may be stored in the same container. The elements each may be stored in a container in an amount of a single use, or each may be stored in a single container in an amount of multiple uses. The elements each may be stored in a container in a dried form, or each may be stored in a container in the form of being dissolved in an appropriate solvent (a solvent containing a buffer solution, a stabilizer, a preservative, an antiseptic, and the like).

### EXAMPLES

[0183] Hereinafter, the present invention is described in further detail based on Examples; however, the present invention is not limited to the following Examples.

[0184] 1. Preparation of Reporter Plasmids

[0185] Using pNLF1-C [CMV Hygro] (produced by PROMEGA Corporation, WI, USA) as a reporter, pNLF-M/A was obtained by converting the 71st and the 107th methionine codons (ATG) to alanine codons (ATA) by using the site-directed mutagenesis method. Subsequently, sequences (BEtag) shown in Table 1 given below were first inserted into the pNLF-M/A. The BEtag sequences each contained a TALE recognition sequence (the underline (*1) in Table 1: 5′-tACAGAAGCGGGCAAAGG-3′; lower-case letters indicate thymine recognized by the N-terminal domain of TALE), a target codon (the underline (*2) in Table 1: 5′-ACG-3′), and a spacer 1 sequence between these, and the length of the spacer 1 sequence was set to 7 bp, 13 bp, 19 bp, 25 bp, or 31 bp, containing the base (A) at 5′ of the target codon. To each BEtag sequence (BEtag-7 to 31 bp: SEQ ID NOs: 1 to 5), an oligonucleotide designed such that a NheI recognition site and a SbfI recognition site were able to be added at the two ends was annealed, and inserted into pNLF-M/A treated with NheI and SbfI to obtain pNLF-BEtag (pNLF-BEtag-7 bp to 31 bp).

[0186] Note that the TALE recognition sequence was a right TALE sequence of TALEN for the human adenomatous polyposis coli gene whose activity in cells has been confirmed (Sakuma et al., “Repeating pattern of non-RVD variations in DNA-binding modules enhances TALEN activity.”, Sci. Rep., 3: 3379 (2013)).

[0187] Moreover, in order to insert the PAM sequence (5′-NGG-3′) into pNLF-BEtag, an oligonucleotide having a sequence (PAM: SEQ ID NO: 6) containing a PAM site as shown in Table 1 given below and an oligonucleotide in which 5′-TCGA-3′ was added to the 5′ terminus of the antisense sequence thereof were annealed, and inserted into each pNLF-BEtag treated with EcoRV and XhoI to prepare reporter plasmids (pNLF-BEtag-7bp-PAM, pNLF-BEtag-13bp-PAM, pNLF-BEtag-19bp-PAM, pNLF-BEtag-25bp-PAM, pNLF-BEtag-31bp-PAM).

[0188] Since the PAM site (the underline (*3) in Table 1) contains nine consecutive “G”, the position of the PAM sequence can be shifted downstream by one base each time by designing the guide RNA such that the complementary sequence of the guide RNA-target sequence positioned on the 5′ side of the PAM site is shifted to the 3′ side by one base each time. In this way, PAM sequences at eight positions (PAM1 to 8 in Table 7 given below) can be set. Each sequence inserted into the pNLF-M/A plasmid is shown in Table 1 given below.

TABLE 1

| | | SEC ID |
|---|---|---|
| Products | Sequence (5′-3′) | NO |
| BEtag-7 | CATAAAATACAGAAGCGGGCAAAGG^{*1} | 1 |
| bp | GGGAAGACG^{*2}GATATCTCC | |
| BEtag-13 | CATAAAATACAGAAGCGGGCAAAGG^{*1} | 2 |
| bp | CTATTTGGGAAGACG^{*2}GATATCTCC | |
| BEtag-19 | CATAAAATACAGAAGCGGGCAAAGG^{*1} | |
| bp | ATTAGTCTATTTGGGAAGACG^{*2} | 3 |
| | GATATCTCC | |
| BEtag-25 | CATAAAATACAGAAGCGGGCAAAGG^{*1} | |
| bp | TTCAGGATTAGTCTATTTGGGAAGACG^{*2} | 4 |
| | GATATCTCC | |
| BEtag-31 | CATAAAATACAGAAGCGGGCAAAGG^{*1} | |
| bp | AGTCTATTCAGGATTAGTCTATTTGG | 5 |
| | GAAGACG^{*2}GATATCTCC | |
| PAM | ATCTCCTGCAGGGGGGGGG^{*3}CCGGC | 6 |

^{*1}TALE recognition sequence
^{*2}target codon containing target base
^{*3}PAM site

[0189] A concept diagram showing the structure of the reporter plasmid thus completed is shown in FIG. 1. In addition, FIG. 2 shows the sequence from the NheI recognition site to the XhoI recognition site, which contains the TALE recognition sequence, the spacer 1, the target site, the PAM site, and the guide RNA-target sequence. In this reporter plasmid, the target codon is located at a position corresponding to the start codon of NanoLuc luciferase, and according to such reporter plasmid, once ACG, which is the target codon, is converted to ATG (C, which is the target base (the target site), is substituted with T) by the TALE-deaminase bound to the TALE recognition sequence, NanoLuc luciferase is expressed (FIG. 3).

[0190] 2. Preparation of a TALE Vector Set and TALE Expression Plasmids

[0191] The sequence and configuration of the TALE vector set was constructed in accordance with Sakuma et al. (2013) such that the TALE repeat unit corresponds to the TALE recognition sequence of the reporter plasmid prepared in the above 1. First, sequences (module sequences) (16 types in total: 1HD to 4HD, 1NG to 4NG, 1NI to 4NI, and 1NN to 4NN) were prepared through artificial DNA synthesis by adding modifications (particularly, the 4th and the 32nd) to module sequences (non-repeat-variable di-residue (non-RVD)) other than the sequences encoding four types of variable residues (RVD: HD, NG, NI, NN) formed by the 12th and 13th, two amino acids, and further adding restriction enzyme BsAI recognition sites to the two terminuses thereof. Subsequently, these module sequences were inserted into pEX-A2J2 (produced by Eurofins Genomics K.K., Tokyo, Japan) to prepare module plasmid sets (16 types in total: pEX1HD to pEX4HD, pEX1NG to pEX4NG, pEX1NI to pEX4NI, and pEX1NN to pEX4NN).

[0192] In addition, DNA sequences FUS2_aXX (7 types in total: XX=1a, 2a, 2b, 3a, 3b, 4a, 4b) and FUS2_b(1-4) (4 types in total) forming array plasmids were prepared through artificial DNA synthesis. These were inserted into pCR8/GW/TOPO (produced by Thermo Fisher Scientific Inc., Waltham, MA, USA) to prepare pCR8_FUS2_aXX and pCR8_FUS_b(1-4). Subsequently, these were used as trap vectors in the initial assemble step (step 1) in the Platinum Gate system described in Sakuma et al. (2013), and array plasmids in which TALE sequences were linked were prepared in accordance with the method described in the same document.

[0193] Subsequently, destination vectors (TALE-WT, TALE-63, TALE-47) was prepared by inserting one of the module sequences and a sequence encoding the C-terminal domain of the TALE following the 3′ terminus of this into pcDNA 3.1s obtained by removing a drug-resistant gene expression unit from pcDNA 3.1(+) (produced by Thermo Fisher Scientific Inc.) in addition to a sequence encoding the N-terminal domain of the TALE, which was prepared through artificial DNA synthesis. The C-terminal domains of the TALE were synthesized through artificial DNA synthesis by using three types of wild type (WT: the number of amino acids of the C-terminal domain=180), a C-terminal domain having a number of amino acids of 63 (63), and a C-terminal domain having a number of amino acids of 47 (47) and referring to the sequence of the C-terminal domain contained in pTALETF_v2 (ID: 32185 to 32188) of Addgene as the sequence encoding “WT”, the sequence of the C-terminal domain contained in pTALEN_v2 (ID: 32189 to 32192) of Addgene as the sequence encoding “63”, and the sequence of the C-terminal domain contained in ptCMV-153/47-VR-NG (Addgene ID: 50704) of Addgene as the sequence encoding “47”. In addition, the N-terminal domains of the TALE were synthesized through artificial DNA synthesis by referring to WT: the sequence of the N-terminal domain contained in pTALETF_v2 (ID: 32185 to 32188) of Addgene; 63: the sequence of the N-terminal domain contained in ptCMV-136/63-VR-HD (ID: 50699) of Addgene; and 47: the sequence of the N-terminal domain contained in ptCMV-153/47-VR-HD (ID: 50703) of Addgene, respectively, in correspondence to these C-terminal domains. TALE expression plasmids were prepared by the Golden Gate method using the array plasmids and destination vectors prepared as described above, in accordance with the method described in Sakuma et al. (2013).

[0194] 3. Preparation of TALE-Deaminase Expression Plasmids (1)

[0195] (1) 104 Amino Acid Linker Series

[0196] First, a AncBE4max expression plasmid and a Target-AID expression plasmid were prepared by respectively inserting a AncBE4max gene (Koblan et al., “Improving cytidine and adenine base editors by expression optimization and ancestral reconstruction.”, Nat Biotechnol, 36, p. 843-846 (2018)) and a Target-AID gene (Nishida et al., “Targeted nucleotide editing using hybrid prokaryotic and vertebrate adaptive immune systems.”, Science 353, aaf8729 (2016)), which were prepared through artificial DNA synthesis, between the BamHI recognition site and the EcoRV recognition site of the pcDNA 3.1s.

[0197] Subsequently, TALE-deaminase expression plasmids having 104 amino acid linker 1 were prepared by the following method. Specifically, double repeat sequences of the Anc689 deaminase gene (Anc689 deaminase: primer SEQ ID NO: 7 to 8), the 10 amino acid linker 2, and the UGI gene (10aa linker-β-lactamase: primer SEQ ID NOs: 11 to 12) were respectively amplified by PCR using primers described in Table 2 given below with AncBE4max gene of the above-described AncBE4max expression plasmid as a template. In addition, PmCDA1 deaminase gene (PmCDA1: primer SEQ ID NOs: 9 to 10) and a sequence encoding 104 amino acid linker 1 (104aa linker: primer SEQ ID NOs: 13 to 17) were amplified by PCR using the primers described in Table 2 given below with Target-AID gene of the above-described Target-AID expression plasmid as a template. Moreover, a sequence from β-lactamase to a sequence encoding the N-terminal domain (WT, 63, or 47) of the TALE (primer SEQ ID NOs: 22 to 25) inclusive was amplified by PCR. The primers used for constructing TALE-deaminase expression plasmids and SEQ ID NOs thereof are shown in Table 2 given below. In Table 2, the codes following for of 104aa linker are such that, for example, “WT-104-BE4” indicates that this sequence is a sequence encoding linker 1 for TALE-deaminase in which the C-terminal domain of the TALE is WT and which contains the 104 amino acid linker 1 and the Anc689 deaminase (BE4). Note that in each Table given below, “AID” does not indicate that the deaminase is AID but indicates that the deaminase is PmCDA1 derived from “Target-AID”.

TABLE 2

| | | SEQ | | SEQ |
|---|---|---|---|---|
| Products | Forward Primer (5′-3′) | ID NO | Reverse Primer (5′-3′) | ID NO |
| Anc698 deaminase | anc689deaminase_F | 7 | anc689deaminase_R_inf10aa | 8 |
| PmCDA1 | PmCDA1_F | 9 | PmCDA1_R_inf10aa | 10 |
| 10aa linker-β-lactamase | 10aa_F | 11 | Amp_F | 12 |
| 104aa linker for WT-104-BE4 | 104aa_F_infWT | 13 | AID_R3_infAnc689 | 15 |
| 104aa linker for 47-104-BE4 | 104aa_F_inf47 | 14 | | |
| 104aa linker for WT-104-AID | 104aa_F_infWT | 13 | AID_R3_infCDA1 | 17 |
| 104aa linker for 63-104-AID | 104aa_F_inf63 | 16 | | |
| 104aa linker for 47-104-AID | 104aa_F_inf47 | 14 | | |
| TALE_WT-β-lactamase | TALE_WT_R | 22 | Amp_R | 25 |
| TALE_63-β-lactamase | TALE_63_R | 23 | | |
| TALE_47-β-lactamase | TALE_47_R | 24 | | |

[0198] Each deaminase, a sequence encoding the 104 amino acid linker 1, a double repeat sequence of the 10 amino acid linker 2 and the UGI gene were inserted between a sequence from β-lactamase to a sequence encoding the N-terminal domain (WT, 63, or 47) of the TALE inclusive, which was prepared in the above 2., and a downstream (3′ side) sequence encoding the C-terminal domain (WT, 63, or 47) of the TALE by the In-Fusion method (TaKaRa Bio Inc, Shiga, Japan) to prepare a plasmid (TALE-deaminase expression plasmid) expressing TALE-deaminase in which TALE (N-terminal domain (WT, 63, or 47)-TALE repeat domain-C-terminal domain (WT, 63, or 47)), 104 amino acid linker 1 (104aa), deaminase (Anc689 deaminase (BE4) or PmCDA1 deaminase (AID)), 10 amino acid linker 2 (10aa), UGI gene (UGI), 10 amino acid linker 2 (10aa), and UGI gene (UGI) were bound in this order from the N-terminus. A concept diagram showing the structure of the TALE-deaminase is shown in FIG. 4.

[0199] (2) 12 Amino Acid Linker Series

[0200] In addition, TALE-deaminase expression plasmids having 12 amino acid linker 1 (12aa) in place of the above 104 amino acid linker 1 were prepared by the following method. Specifically, sequences encoding 12 amino acid linker 1 were prepared by annealing oligonucleotides described in Table 3. In Table 3, the codes following for of 12aa linker (SEQ ID NOs: 18 to 21) are such that, for example, “TALE_WT-12-AID” indicates that this sequence is a sequence encoding linker 1 for TALE-deaminase in which the C-terminal domain of the TALE is WT and which contains the 12 amino acid linker 1 and the PmCDA1 deaminase (AID). The 12 amino acid linker 1 is composed of 12 amino acids described in Yang L et al., “Engineering and optimising deaminase fusions for genome editing.”, Nat Commun 7 13330 (2016). Subsequently, a portion other than the sequence encoding 104 amino acid linker 1 of the above-described TALE-deaminase expression plasmid was amplified by inverse PCR using each of primers (SEQ ID NOs: 9, 22 to 24) shown in Table 4 given below, and the sequence encoding 12 amino acid linker 1 was inserted by the In-Fusion method. Sequences encoding 12 amino acid linker 1 and SEQ ID NOs thereof are shown in Table 3 given below, and the primers used for inverse PCR and SEQ ID NOs thereof are shown in Table 4 given below.

TABLE 3

| | Sense | SEQ | Antisense | SEQ |
|---|---|---|---|---|
| Products | oligonucleotide | ID NO | oligonucleotide | ID NO |
| 12 aa linker for | 12aa_infWT | 18 | 12aa_infCDA1 | 21 |
| TALE_WT-12-AID | | | | |
| 12 aa linker for | 12aa_inf63 | 19 | | |
| TALE_63-12-AID | | | | |
| 12 aa linker for | 12aa_inf47 | 20 | | |
| TALE_47-12-AID | | | | |

TABLE 4

| | Forward Primer | SEQ | Reverse Primer | SEQ |
|---|---|---|---|---|
| Final Products | (5′-3′) | ID NO | (5′-3′) | ID NO |
| TALE_WT-12-AID | PmCDA1_F | 9 | TALE_WT_R | 22 |
| TALE_63-12-AID | | | TALE_63_R | 23 |
| TALE_12-12-AID | | | TALE_47_R | 24 |

[0201] (3) Amino Acids in Length Adjustment Linker Series

[0202] Furthermore, TALE-deaminase expression plasmids encoding, in place of 104 amino acid linker 1, amino acid linkers 1 which were obtained by deleting amino acids in the order from the C-terminal side of the 104 amino acid linker 1 so as to have 12, 24, 36, 48, 60, or 84 amino acids in length in TALE-47-104-AID were prepared by the following method. Specifically, a portion other than the sequence encoding the amino acids to be deleted of the above-described TALE-deaminase expression plasmid was amplified by inverse PCR using primers (SEQ ID NOs: 9, 26 to 31) described in Table 5 given below, and caused to self-ligate by the In-Fusion method. The primers used for preparing the amino acid linker 1 deletion mutants of TALE-47-104-AID and SEQ ID NOs thereof are shown in Table 5 given below.

TABLE 5

| | Forward Primer | SEQ | Reverse Primer | SEQ |
|---|---|---|---|---|
| Final Products | (5′-3′) | ID NO | (5′-3′) | ID NO |
| TALE_47-12′-AID | PmCDA1_F | 9 | 12aa_R_infCDA1 | 26 |
| TALE_47-24′-AID | | | 24aa_R_infCDA1 | 27 |
| TALE_47-36′-AID | | | 36aa_R_infCDA1 | 28 |
| TALE_47-48′-AID | | | 48aa_R_infCDA1 | 29 |
| TALE_47-60′-AID | | | 60aa_R_infCDA1 | 30 |
| TALE_47-84′-AID | | | 84aa_R_infCDA1 | 31 |

[0203] In addition, as negative controls (NC) of TALE-deaminases, plasmids (TALE-deaminase-NC expression plasmids) expressing TALE-deaminase-NC corresponding to the respective TALE-deaminases were prepared in the same manner as described above except that TALE-deaminase-NC constructed to recognize and bind to the NC sequence: 5′-tTGCGCGTATAGTCGCG-3′ (SEQ ID NO: 32) in place of the TALE recognition sequence of the reporter plasmids prepared in the above-described 1. was expressed so that the TALE repeat units did not bind to the human genome.

[0204] A list of the configurations of the TALE-deaminases and negative controls thereof (TALE-deaminase-NC) of the prepared expression plasmids as well as SEQ ID NOs showing the sequences (SEQ ID NOs of base sequences, SEQ ID NOs of amino acid sequences) are shown in Table 6.

TABLE 6

| TALE-deaminase | | | | | | TALE-deaminase-NC (negative control) | | | | | |
|---|---|---|---|---|---|---|---|---|---|---|---|
| | TALE | TALE | Length | | | | TALE | TALE | Length | | |
| | recog- | C- | of | | | | recog- | C- | of | | |
| | nition | terminal | linker 1 | Deam- | SEQ | | nition | terminal | linker 1 | Deam- | SEQ |
| ID | sequence | domain | (a.a.) | inase | ID NO | ID | sequence | domain | (a.a.) | inase | ID NO |
| WT-104-BE4 | Human | WT | 104 | Anc689 | 33, 34 | WT-104-BE4-NC | Non-human | WT | 104 | Anc689 | 35, 36 |
| 47-104-BE4 | | 47 | | | 37, 38 | 47-104-BE4-NC | | 47 | | | 39, 40 |
| WT-104-AID | | WT | 104 | PmCDA1 | 41, 42 | WT-104-AID-NC | | WT | 104 | PmCDA1 | 43, 44 |
| 63-104-AID | | 63 | | | 45, 46 | 63-104-AID-NC | | 63 | | | 47, 48 |
| 47-104-AID | | 47 | | | 49, 50 | 47-104-AID-NC | | 47 | | | 51, 52 |
| WT-12-AID | | WT | 12 | PmCDA1 | 53, 54 | WT-12-AID-NC | | WT | 12 | PmCDA1 | 55, 56 |
| 63-12-AID | | 63 | | | 57, 58 | 63-12-AID-NC | | 63 | | | 59, 60 |
| 47-12-AID | | 47 | | | 61, 62 | 47-12-AID-NC | | 47 | | | 63, 64 |
| 47-12′ to | | 47 | 12, 24, | PmCDA1 | — | 47-12′ to | | 47 | 12, 24, | PmCDA1 | — |
| 84′-AID | | | 36, 48, | | | 84′-AID-NC | | | 36, 48, | | |
| | | | 60 or 84 | | | | | | 60 or 84 | | |

| | | | | | | |
|---|---|---|---|---|---|---|
| AncBE4max | — | — | — | Anc689 | — | — |

[0205] 4. Preparation of Cas9 Expression Plasmids

[0206] First, a Cas9 expression plasmid pX330_BS was prepared by synthesizing a region from the U6 promoter to the BGH poly A addition sequence of the pX330 (Addgene, Cambridge, MA; Plasmid 42230) through artificial DNA synthesis, and inserting the region between the EcoRV recognition site and the BamHI recognition site of the pBlueScript II (SK+) (Stratagene, La Jolla, CA, USA) by the In-Fusion method. Subsequently, a nickase-type nCas9 (D10A) expression plasmid and a dCas9 (D10A+H840A) expression plasmid having no cleavage activity were prepared by conducting the site-directed mutagenesis method by PCR on the Cas9 gene of the pX330_BS.

[0207] 5. Preparation of Guide RNA Expression Plasmids (1)

[0208] First, a plasmid (pX330_BS-Δ Cas9) was prepared by treating the pX330_BS prepared in the above 4. with XbaI and NotI to remove the Cas9 gene, and conducting self-ligation after fill-in reaction. Subsequently, oligonucleotides designed to correspond to the target sequences of the guide RNAs shown in Table 7 given below (Table 7 shows complementary sequences of the target sequences (on the antisense strand) of the guide RNAs) (sequences other than those underlined in Table 7) were annealed, and inserted into the pX330_BS-Δ Cas9 by BpiI treatment and ligation to prepare plasmids (guide RNA expression plasmids 1 to 8) expressing the respective guide RNAs (sgRNA-1 to 8). The complementary sequences (other than those underlined) of the target sequences of the guide RNAs and the PAM sequences (underlined) of Cas9 are shown in Table 7 given below.

TABLE 7

| | | complementary sequence of | |
|---|---|---|---|
| Position | | target sequence | SEQ |
| of PAM | Guide | of guide RNA and | ID |
| sequence | RNA | PAM sequence | NO |
| PAM1 | sgRNA-1 | GGAAGACGGATATCTCCTGC AGG | 65 |
| PAM2 | sgRNA-2 | GAAGACGGATATCTCCTGCA GGG | 66 |
| PAM3 | sgRNA-3 | AAGACGGATATCTCCTGCAG GGG | 67 |
| PAM4 | sgRNA-4 | AGACGGATATCTCCTGCAGG GGG | 68 |
| PAM5 | sgRNA-5 | GACGGATATCTCCTGCAGGG GGG | 69 |
| PAM6 | sgRNA-6 | ACGGATATCTCCTGCAGGGG GGG | 70 |
| PAM7 | sgRNA-7 | CGGATATCTCCTGCAGGGGG GGG | 71 |
| PAM8 | sgRNA-8 | GGATATCTCCTGCAGGGGGG GGG | 72 |

Underline: PAM sequence

[0209] 6. Transformation to HEK Cells (1)

[0210] HEK293 T-cells grown in a DMEM medium containing 10% FBS were incubated in the respective wells of a 96-well plate with 5×10⁴ cells in each well. Into the HEK293 T-cells, 75 ng of one of the TALE-deaminase expression plasmids and the TALE-deaminase-NC expression plasmids described in Table 6; 50 ng of the nCas9 expression plasmid or the dCas9 expression plasmid prepared in the above 4.; 10 ng of one of the guide RNA expression plasmids 1 to 8 and the pX330_BS-Δ Cas9 (with no guide RNAs) prepared in the above 5.; 20 ng of one of the reporter plasmids prepared in the above 1.; and 5 ng of pGL4.54 (produced by PROMEGA Corporation), which was a reference plasmid, were introduced by using Lipofectamine LTX (produced by Thermo Fisher Scientific Inc.). The reference plasmid is a plasmid expressing firefly luciferase (Fluc).

[0211] In addition, as positive controls, 75 ng of the AncBE4max expression plasmid prepared in the above 3.; 10 ng of one of the guide RNA expression plasmids 1 to 8 and pX330_BS-Δ Cas9 (with no guide RNAs) prepared in the above 5.; 20 ng of one of the reporter plasmids prepared in the above 1.; and 5 ng of pGL4.54 were combined and introduced into the HEK293 T-cells.

[0212] 7. Measurement of NanoLuc Luciferase Activity Values

[0213] The medium was removed after culturing for 24 hours since transformation, followed by washing with PBS(−), and thereafter the cells were dissolved by treatment using Passive Lysis Buffer (produced by PROMEGA Corporation) to obtain cell lysates. The cell lysates were diluted to 100 times with DMEM media, and NanoLuc luciferase activity scores and firefly luciferase activity scores were measured with TriStar S LB942 plate reader (produced by Berthold Technologies, Bad Wildbad, Germany) by using Nano-Glo Dual-Luciferase Reporter Assay System (produced by PROMEGA Corporation).

[0214] For the negative control of each score, NanoLuc luciferase activity score of cells in which the TALE-deaminase-NC expression plasmid was introduced was measured. Note that for the positive controls (cells in which the AncBE4max expression plasmid was introduced), activity score of cells in which the pX330_BS-Δ Cas9 expression plasmid was introduced (cells expressing no guide RNA) was measured as the negative control (AncBE4max-NC).

[0215] The quantification of the activity was conducted as follows. First, each NanoLuc luciferase activity score was standardized by using the firefly luciferase activity score of the reference plasmid. Subsequently, by using the standardized activity score, the activity score of the cells in which the TALE-deaminase-NC expression plasmid was introduced was subtracted from the activity score of the cells in which the TALE-deaminase expression plasmid was introduced to obtain the activity value of the TALE-deaminase activity. In addition, AncBE4max-NC was subtracted from the activity score of the cells in which the expression plasmid of AncBE4max was introduced to obtain the AncBE4max activity value. Furthermore, in order to compare the TALE-deaminase activity between the tests, the TALE-deaminase activity value was represented as a relative activity as the AncBE4max activity value under PAM2 condition, which is described later, was deemed as 1. Each test was conducted repeatedly at least three times, and a standard deviation was added to the average value to obtain a graph.

[0216] <Test 1> Effects of the Position of the PAM Sequence on the Activity of Base Editors

[0217] In order to examine the position of the PAM sequence where AncBE4max, which was an existing Base editor, exhibited the highest activity as the positive control, the position of the PAM sequence was shifted to the 3′ side (downstream) by one base each time (PAM1 to PAM8), and the base editing activity was checked.

[0218] It is known that in AncBE4max, in the case where the position of the PAM sequence is set to the 21st to 23rd positions in a target DNA sequence, the position of a target base having a high base editing activity becomes the 4th to 8th positions in the same target DNA sequence (Rees, H. A. and Liu, D. R., Nat Rev Genet 19, 770-788 (2018)). In the reporter used in this study, the position of the PAM sequence can be changed from PAM1 to PAM8 described in Table 7 by designing the reporter such that the target sequence of the guide RNA changes as described above. Hence, the position of the target base is changed accordingly.

[0219] The AncBE4max expression plasmid prepared in the above 3., one of the guide RNA expression plasmids 1 to 8 prepared in the above 5., the reporter plasmid (spacer 1: 19 bp) prepared in the above 1., and pGL4.54, which was the reference plasmid, were combined and introduced into the HEK293 T-cells in the above 6., and AncBE4max activity values were obtained by the above 7. In addition, as the negative control, pX330_BS-Δ Cas9 was used in place of the guide RNA expression plasmid.

[0220] Results are shown in FIG. 5. In FIG. 5, on the premise that the AncBE4max activity value when the guide RNA expression plasmid 2 was used, that is, in PAM2 was deemed as 1.0, and the AncBE4max activity values when the guide RNA a expression plasmids 1 to 8 were used, that is, in PAM1 to 8 are shown. As shown in FIG. 5, it was found that the AncBE4max activity value exhibited the maximum activity in PAM2. Hence, the AncBE4max activity value in PAM2 was determined as positive control for the following activity evaluation.

[0221] <Test 2> Effects of the Length of the Spacer 1 on the Activity of TALE-Deaminases

[0222] (BE4 Series)

[0223] For two types of TALE-deaminases (WT-104-BE4, 47-104-BE4) in which the C-terminal domain of the TALE was WT or 47, the amino acid linker 1 had 104 amino acids, and the deaminase was BE4 (Anc689), the effects of the length of the spacer 1 of the reporter on the activity were checked with the position of the PAM sequence being fixed to PAM2. The length of the spacer 1 was set to 7 bp, 13 bp, 19 bp, 25 bp, and 31 bp. In addition, as Cas9/guide RNA, three conditions where nCas9 (D10A) and the guide RNA were expressed (nCas9), where dCas9 (D10A+H840A) and the guide RNA were expressed (dCas9), and where nCas9 was expressed and the guide RNA was not expressed (nCas9/no guide) were studied.

[0224] The TALE-deaminase expression plasmid (WT-104-BE4 or 47-104-BE4) prepared in the above 3.(1) or a TALE-deaminase-NC expression plasmid corresponding to this, the nCas9 expression plasmid or dCas9 expression plasmid prepared in the above 4., the guide RNA expression plasmid 2 prepared in the above 5. or pX330_BS-Δ Cas9, the reporter plasmid (spacer 1: 7 to 31 bp) prepared in the above 1., and pGL4.54, which was the reference plasmid, were combined and introduced into the HEK293 T-cells in the above 6., and TALE-deaminase activity values (proportions to AncBE4max activity values) were obtained by the above 7.

[0225] Results are shown in FIG. 6. As shown in FIG. 6, in any of the TALE-deaminases (BE4), in the case where there was no guide RNA, that is, in the case where nCas9 was not bound in the vicinity of the target base, no activity was observed. In addition, the activity was higher in the case where nCas9 was used and nicks were induced in the bottom strand than in the case where dCas9 was used and no nicks were induced. Regarding the length of the spacer 1, higher activity was exhibited when the length was 13 bp and 25 bp, and even higher activity was exhibited when the length was 25 bp. Regarding the C-terminal domain of the TALE, activity was higher in 47 (0.29±0.03) than in WT (for example, in the case of nCas9 and the length of the spacer 1: 25 bp, 0.19±0.01).

[0226] (AID Series)

[0227] For six types of TALE-deaminases (WT-104/12-AID, 63-104/12-AID, 47-104/12-AID) in each of which the C-terminal domain of TALE was WT, 63, or 47, the amino acid linker 1 had 104 amino acids or 12 amino acids, and the deaminase was AID (PmCDA1), the effects of the length of the spacer 1 of the reporter on the activity were examined in the same manner as in the case of BE4 described above.

[0228] Results are shown in FIG. 7. As shown in FIG. 7, in any of the TALE-deaminases (AID), in the case where there was no guide RNA, that is, in the case where nCas9 was not bound in the vicinity of the target base, no activity was observed. In addition, in WT-104-AID, 63-104-AID, WT-12-AID, and 63-12-AID, the activity was higher in the case where nCas9 was used and nicks were induced in the bottom strand than in the case where dCas9 was used and no nicks were induced in the same manner as in the case where the deaminase was BE4. On the other hand, in 47-104-AID and 47-12-AID, the effect of nicks was not so significant.

[0229] Regarding the length of the spacer 1, higher activity was exhibited when the length was 25 bp in all of the TALE-deaminases (AID), and higher activity was similarly exhibited also when the length was 19 bp in 63-104-AID and 47-12-AID. Regarding the C-terminal domain of the TALE, in the case of the 104 amino acid linker 1, activity was such that WT (for example, in the case of nCas9 and the length of the spacer 1: 25 bp, 0.09±0.00), 63 (0.16±0.01), 47 (0.4±0.03) (FIGS. 7-A, B, C); and in the case of the 12 amino acid linker 1, activity was WT (0.32±0.02), 63 (0.38±0.03), 47 (0.57±0.02) (FIGS. 7-D, E, F). Hence, in the case where the length of the amino acid linker 1 is the same, 47>63>WT. In addition, in the case where comparison was made among those having the same C-terminal domain of the TALE, activity was higher with the 12 amino acid linker 1 than with the 104 amino acid linker 1. The TALE-deaminase (AID) exhibited the highest activity was 47-12-AID (for example, in the case of nCas9 and the length of the spacer 1: 19 bp, 0.57±0.2).

[0230] <Test 3> Effects of the Position of the PAM Sequence on the Activity of TALE-Deaminases

[0231] The length of the spacer 1 of the reporter was fixed, and the position of the PAM sequence was shifted to the 3′ side (downstream) by one base each time, and the effects of the position of the PAM sequence (that is, corresponding to the position of Cas9) on the activity of the TALE-deaminase were examined. As the length of the spacer 1, the study was conducted for 13 bp, 19 bp, 25 bp with which the activity was relatively high when the activity was evaluated in Test 2.

[0232] The TALE-deaminase expression plasmid (AID series: WT-104/12-AID, 63-104/12-AID, 47-104/12-AID) prepared in the above 3.(1)(2) or a TALE-deaminase-NC express ion plasmid corresponding to this, the nCas9 expression plasmid prepared in the above 4., the guide RNA expression plasmids 1 to 8 prepared in the above 5., the reporter plasmid (spacer 1: 13, 19, or 25 bp) prepared in the above 1., and pGL4.54, which was the reference plasmid, were combined and introduced into the HEK293 T-cells in the above 6., and TALE-deaminase activity values (proportions to AncBE4max activity values) were obtained by the above 7.

[0233] Results are shown in FIG. 8. As shown in FIG. 8, in the TALE-deaminases (AID series) other than 47-12-AID, higher activity was exhibited when the length of the spacer 1 was 19 bp. As the position of the PAM sequence, WT-104-AID exhibited high activity at PAM6 (for example, in the case of the length of the spacer 1: 19 bp, 0.42±0.08) or PAM7 (0.38±0.05) (FIG. 8-A), 63-104-AID at PAM7 (0.39±0.00) (FIG. 8-B), also 47-104-AID at PAM7 (0.90±0.10) (FIG. 8-C), also WT-12-AID at PAM7 (0.91±0.04) (FIG. 8-D), and 63-12-AID at PAM6 (0.49±0.02) (FIG. 8-E). On the other hand, 47-12-AID exhibited high activity at PAM4 (0.86±0.02) or PAM7 (0.96±0.03) when the length of the spacer 1 was 13 bp, at PAM1 (0.79±0.05) when the length of the spacer 1 was 19 bp, and at PAM6 (0.74±0.13) when the length of the spacer 1 was 25 bp (FIG. 8-F). Among these, 47-104-AID with the length of the spacer 1: 19 bp/PAM7 (0.90±0.10), WT-12-AID with the length of the spacer 1: 19 bp/PAM7 (0.91±0.04), 47-12-AID with the length of the spacer 1: 13 bp/PAM7 (0.96±0.03) exhibited higher activity.

[0234] <Test 4> Effects of the Length of the Amino Acid Linker 1 on the Activity of the TALE-Deaminase

[0235] Although it was revealed that activity was higher with 12 amino acids than with 104 amino acids as the amino acid linker 1 from the above Test 3, the amino acids in length were not studied. In view of this, the effects of the length of the amino acid linker 1 was examined by using the TALE-deaminase expression plasmids (47-12′ to 84′-AID: the length of the amino acid linker 1: 84 amino acids, 60 amino acids, 36 amino acids, 24 amino acids, and 12 amino acids) prepared in the above 3.(3).

[0236] Each TALE-deaminase expression plasmid prepared in the above 3.(3) or a TALE-deaminase-NC expression plasmid corresponding to this, the nCas9 expression plasmid prepared in the above 4., the guide RNA expression plasmid 2 prepared in the above 5., the reporter plasmid (spacer 1: 25 bp) prepared in the above 1., and pGL4.54, which was the reference plasmid, were combined and introduced into the HEK293 T-cells in the above 6., and TALE-deaminase activity values (proportions to AncBE4max activity values) were obtained by the above 7.

[0237] Results are shown in FIG. 9. FIG. 9 also shows results when 47-104-AID prepared in the above 3.(1), or 47-12-AID prepared in the above (2), or a TALE-deaminase-NC expression plasmid corresponding to this was used as the TALE-deaminase expression plasmid together. As shown in FIG. 9, although the activity of the TALE-deaminase (AID) was slightly low in the case where the length of the amino acid linker 1 was shortened to 12 amino acids, it was revealed that the effects of the length of the amino acid linker 1 on the activity were not so much.

[0238] 8. Preparation of TALE-Deaminase Expression Plasmids (2)

[0239] (1) BE4 Series (BE4-TALE)

[0240] (a) 32 Amino Acid Linker Series (BE4-32-TALE)

[0241] An expression plasmid of a TALE-deaminase (hereinafter sometimes referred to as “BE4-32-TALE”) in which Anc689 deaminase (BE4), a linker 1 (32 amino acids), and TALE (C-terminal domain: WT, 63, or 47) were arranged in this order from the N-terminus was prepared by the following method. Specifically, first, the 5′ side (primer SEQ ID NO: 25, 73 to 74) containing a sequence encoding the 32 amino acid linker 1 and the 3′ side (primer SEQ ID NO: 12, 75 to 77) containing a sequence encoding a double repeat of the 10 amino acid linker 2 and UGI were amplified by PCR using the primers described in Table 8 given below with the AncBE4max expression plasmid prepared in 3.(1) as a template. In addition, sequences (primer SEQ ID NO: 22 to 24, 78 to 79) encoding the respective TALEs were amplified by PCR with each of the destination vectors (TALE-WT, TALE-63, and TALE-47) prepared in 2. as a template. The primers used for constructing the BE4-32-TALE expression plasmids and SEQ ID NOs thereof are shown in Table 8 given below.

TABLE 8

| | Forward Primer | SEQ | Reverse Primer | SEQ |
|---|---|---|---|---|
| Products | (5′-3′) | ID NO | (5′-3′) | ID NO |
| β-lactamase-Anc689 deaminase-32aa | BE4_32aa + infTALEW | 73 | Amp_R | 25 |
| Liker for BE4-32-WT, BE4-32-63 | | | | |
| β-lactamase-Anc689 deaminase-32aa | BE4_32aa + infTALE47 | 74 | | |
| Liker for BE4-32-47 | | | | |
| 10aa-UGI-10aa-UGI-NLS-β-lactamase | 10aa_F + infWT | 75 | Amp_F | 12 |
| for BE4-32-WT | | | | |
| 10aa-UGI-10aa-UGI-NLS-β-lactamase | 10aa_F + inf63 | 76 | | |
| for BE4-32-63 | | | | |
| 10aa-UGI-10aa-UGI-NLS-β-lactamase | 10aa_F + inf47 | 77 | | |
| for BE4-32-47 | | | | |
| TALE-WT | TALE_WT_F | 78 | TALE_WT_R | 22 |
| TALE-63 | | | TALE_63_R | 23 |
| TALE-47 | TALE_47_F | 79 | TALE_47_R | 24 |

[0242] Destination vectors (BE4-32-WT, BE4-32-63, and BE4-32-47) for expressing BE4-32-TALE expression plasmids in which the deaminase (Anc689 deaminase (BE4)), the linker 1 (32 amino acids), the TALE (C-terminal domain: WT, 63, or 47) were arranged in this order from the N-terminus were prepared by the In-Fusion method in the same manner as in 3.(1) by combining the above-described three fragments. Each TALE-deaminase expression plasmid or TALE-deaminase-NC expression plasmid was prepared by the Golden Gate method in the same manner as in 2. by using these and an array plasmid obtained by linking the TALE sequence prepared in 1., or an array plasmid obtained by linking the NC sequence prepared in 3. A concept diagram showing the structure of the TALE-deaminase is shown in (A) of FIG. 11. In addition, a list of the configurations of the TALE-deaminases and the negative controls (TALE-deaminase-NC) thereof and SEQ ID NOs showing the sequences thereof (SEQ ID NOs of the base sequences and SEQ ID NOs of the amino acid sequences) in the respective expression plasmids thus prepared is shown in Table 12 given below.

[0243] (b) Amino Acids in Length Adjustment Linker Series (BE4-135/234-TALE)

[0244] Subsequently, expression plasmids (the length of the linker 1: 135 or 234 amino acids containing tether sequences added to the front and back of the HTS95 amino acid sequence) of TALE-deaminases (hereinafter, sometimes referred to as “BE4-135-TALE” or “BE4-234-TALE”) obtained by inserting a sequence encoding HTS95 amino acid sequence (Sun, N. and Zhao, H., Mol BioSyst 10, p. 446-453 (2014), Doi: 10.1039/c3mb70412b), which was a known linker sequence, or a sequence encoding a double repeat thereof on the downstream side of the sequence encoding the length (32 amino acids) of the linker 1 between deaminases and TALE were prepared by the following method. Specifically, the 5′ side (primer SEQ ID NOs: 25, 80) containing a sequence encoding the 32 amino acid linker 1 and the 3′ side (primer SEQ ID NOs: 12, 81 to 82) following the sequence encoding each TALE were amplified by PCR using the primers described in Table 9 given below with each of the destination vectors of BE4-32-WT, BE4-32-63, and BE4-32-47 prepared in 8.(1)(a) as a template. The primers used and SEQ ID NOs thereof are shown in Table 9 given below.

TABLE 9

| | Forward Primer | SEQ | Reverse Primer | SEQ |
|---|---|---|---|---|
| Products | (5′-3′) | ID NO | (5′-3′) | ID NO |
| β-lactamase-Anc689 deaminase-32aa | BE4_32aa + inf95aa5′-2 | 80 | Amp_R | 25 |
| Liker for HTS 95aa linker insertion | | | | |
| TALEWT 10aa-UGI-10aa-UGI-NLS | TALEWT_F + inf95aa3′-2 | 81 | Amp_F | 12 |
| β-lactamase for HTS 95aa linker | | | | |
| insertion | | | | |
| TALE63 10aa-UGI-10aa-UGI-NLS | | | | |
| β-lactamase for HTS 95aa linker | | | | |
| insertion | | | | |
| TALE47 10aa-UGI-10aa-UGI-NLS | TALE47_F + inf95aa3′-2 | 82 | | |
| β-lactamase for HTS 95aa linker | | | | |
| insertion | | | | |

[0245] In addition, a plasmid containing sequences (HTS95: SEQ ID NO of the base sequence: 105 and the SEQ ID NO of the amino acid sequence: 106) encoding HTS95 amino acid sequence and tether sequences at the front and back thereof was double-digested with restriction enzymes AleI and PshAI, the objective DNA fragment containing a sequence encoding HTS95 was recovered by agarose gel electrophoresis, ligation was conducted by using T4 ligase, followed by double digestion with restriction enzymes XmaI and SaclI, and the objective DNA fragment containing HTS95×2 was recovered by agarose gel electrophoresis.

[0246] Destination vectors (BE4-135-WT, BE4-135-63, BE4-135-47, BE4-234-WT, BE4-234-63, and BE4-234-47) for expressing BE4-135-TALE or BE4-234-TALE in which the deaminase (Anc689 deaminase (BE4)), the linker 1 (135 amino acids or 234 amino acids), the TALE (C-terminal domain: WT, 63, or 47) were arranged in this order from the N-terminus were prepared by the In-Fusion method in the same manner as in 3.(1) by combining the above-described three fragments. Each TALE-deaminase expression plasmid or TALE-deaminase-NC expression plasmid was prepared by the Golden Gate method in the same manner as in 2. by using these destination vectors and an array plasmid obtained by linking the TALE sequence prepared in 1., or an array plasmid obtained by linking the NC sequence prepared in 3. A concept diagram showing the structure of the TALE-deaminase is the same as (a) of FIG. 11. In addition, a list of the configurations of the TALE-deaminases and the negative controls (TALE-deaminase-NC) thereof and SEQ ID NOs showing the sequences thereof (SEQ ID NOs of the base sequences and SEQ ID NOs of the amino acid sequences) in the respective expression plasmids thus prepared is shown in Table 12 given below.

[0247] (2) ABE8e Series (ABE8e-TALE)

[0248] First, ABEmax expression plasmids 2 were prepared by inserting ABEmax gene (Koblan et al., Nat Biotechnol, 36, p. 843-846 (2018)) prepared through artificial DNA synthesis between the BamHI recognition site and the EcoRV recognition site of pcDNA 3.1s.

[0249] Subsequently, a plasmid expressing ABE8e(V106W) (Richter, M. F., et al., Nat Biotechnol 38, p. 883-891 (2020), Doi: 10.1038/s41587-020-0453-z), which is an improved version of ABEmax, was prepared. Specifically, a sequence encoding NLS at the N-terminus of the 3′-ABEmax gene to the sequence-5′ encoding up to the C-terminus of the 32 amino acid linker 1 were amplified by PCR (primer SEQ ID NOs: 83 to 84) using the primers described in Table 10 given below with the ABEmax expression plasmid 2 as a template to obtain an acceptor. In addition, primers were designed to contain mutations which induced V106W, A109S, T111R, D119N, H122N, Y147D, F149Y, T166I, and D167N on the ABE7.10 gene, and two fragment A (primer SEQ ID NOs: 85 to 86) and fragment B (primer SEQ ID NOs: 87 to 88) were amplified by PCR with the ABEmax expression plasmid 2 as a template. Subsequently, the two fragments were inserted into the acceptors by the In-Fusion method to prepare an ABE8e (TadA-8e(V106W)) expression plasmid. The primers used and SEQ ID NOs thereof are shown in Table 10 given below. Note that in each Table given below, “ABE8e” indicates that the deaminase is TadA-8e(V106W).

TABLE 10

| | Forward Primer | SEQ | Reverse Primer | SEQ |
|---|---|---|---|---|
| Products | (5′-3′) | ID NO | (5′-3′) | ID NO |
| N-terminal NLS and 32aa | 5′NLS_R-infTadA | 83 | ABE8e-F2 | 84 |
| Linker-Cas9 (D10A)-NLS for ABE8e | | | | |
| A fragment for ABE8e | TadA7.1_F | 85 | ABE8e_R1 | 86 |
| B fragment for ABE8e | ABE8e_F1 | 87 | ABE8e_R2 | 88 |

[0250] Subsequently, an expression plasmid of TALE-deaminase (hereinafter, sometimes referred to as “ABE8e-32-47”, “ABE8e-135-47”, or “ABE8e-234-47”) in which the ABE deaminase (ABE8e), the linker 1 (32 amino acids, 135 amino acids, or 234 amino acids), and the TALE (C-terminal domain: 47) were arranged in this order from the N-terminus was prepared by the following method. Specifically, the 5′ side containing a sequence encoding NLS at the N terminus and the 3′ side containing a sequence encoding from the 32 amino acid linker to the C-terminal side were amplified, containing a vector, by PCR (primer SEQ ID NO: 89 to 90) using primers described in Table 11 given below with each of the destination vectors BE4-32-47, BE4-135-47, or BE4-234-47 prepared in 8.(1)(a) and (b) as a template to obtain an acceptor. In addition, a ABE8e(TadA-8e(V106W)) gene portion amplified by PCR (addition of primer SEQ ID NOs: 91 to 92) with the ABE8e(TadA-8e(V106W)) expression plasmid as a template was inserted into the acceptor by the In-Fusion method to prepare a destination vector for expressing ABE8e-32-47, ABE8e-135-47, or ABE8e-234-47. The primers used and SEQ ID NOs thereof are shown in Table 11 given below.

TABLE 11

| | Forward Primer | SEQ | Reverse Primer | SEQ |
|---|---|---|---|---|
| Products | (5′-3′) | ID NO | (5′-3′) | ID NO |
| N-terminal NLS and 32aa | SV40NLS_R | 89 | 32aaLinker_F | 90 |
| Linker-TALE-NLS for ABE8e-TALE | | | | |
| ABE8e-V82G for ABE8e-TALE | ABE8e_Rinf32aa | 91 | ABE8e_FinfNLS | 92 |

[0251] Each TALE-deaminase expression plasmid or TALE-deaminase-NC expression plasmid was prepared by the Golden Gate method in the same manner as in 2. by using each destination vector and an array plasmid obtained by linking the TALE sequence prepared in 1., or an array plasmid obtained by linking the NC sequence prepared in 3. A concept diagram showing the structure of the TALE-deaminase is shown in (B) of FIG. 11. In addition, a list of the configurations of the TALE-deaminases and the negative controls (TALE-deaminase-NC) thereof and SEQ ID NOs showing the sequences thereof (SEQ ID NOs of the base sequences and SEQ ID NOs of the amino acid sequences) in the respective expression plasmids thus prepared is shown in Table 12 given below.

TABLE 12

| TALE-deaminase | | | | | | TALE-deaminase-NC (negative control) | | | | | |
|---|---|---|---|---|---|---|---|---|---|---|---|
| | TALE | TALE | Length | | | | TALE | TALE | Length | | |
| | recog- | C- | of | | | | recog- | C- | of | | |
| | nition | terminal | linker 1 | Deam- | SEQ | | nition | terminal | linker 1 | Deam- | SEQ |
| ID | sequence | domain | (a.a.) | inase | ID NO | ID | sequence | domain | (a.a.) | inase | ID NO |
| BE4-32-WT | human | WT | 32 | Anc689 | 93, 94 | BE4-32-WT-NC | Non-human | WT | 32 | Anc689 | 95, 96 |
| BE4-135-WT | | | 135 | | 107, 108 | BE4-135-WT-NC | | | 135 | | 109, 110 |
| BE4-234-WT | | | 234 | | 119, 120 | BE4-234-WT-NC | | | 234 | | 121, 122 |
| BE4-32-63 | | 63 | 32 | | 97, 98 | BE4-32-63-NC | | 63 | 32 | | 99, 100 |
| BE4-135-63 | | | 135 | | 111, 112 | BE4-135-63-NC | | | 135 | | 113, 114 |
| BE4-234-63 | | | 234 | | 123, 124 | BE4-234-63-NC | | | 234 | | 125, 126 |
| BE4-32-47 | | 47 | 32 | | 101, 102 | BE4-32-47-NC | | 47 | 32 | | 103, 104 |
| BE4-135-47 | | | 135 | | 115, 116 | BE4-135-47-NC | | | 135 | | 117, 118 |
| BE4-234-47 | | | 234 | | 127, 128 | BE4-234-47-NC | | | 234 | | 129, 130 |
| ABE8e-32-47 | | 47 | 32 | TadA-8e | 131, 132 | ABE8e-32-47-NC | | 47 | 32 | TadA-8e | 133, 134 |
| ABE8e-135-47 | | | 135 | (V106W) | 135, 136 | ABE8e-135-47-NC | | | 135 | (V106W) | 137, 138 |
| ABE8e-234-47 | | | 234 | | 139, 140 | ABE8e-234-47-NC | | | 234 | | 141, 142 |

[0252] 9. Preparation of TALE-Deaminase Expression Plasmids Targeting Endogenous DNA (Genomic DNA)

[0253] As TALE recognition sequences, array plasmids obtained by linking TALE sequences in the same method as in a 2. were prepared to target eight types of sequences on endogenous DNAs described in Table 13 given below. As the endogenous DNAs, CCR5 and HBB for which family genes with high homology (CCR2 and HBD) exist were set.

[0254] Each expression plasmid (TALE-AID expression plasmid) of a TALE-deaminase (WT(*)-12-AID, 47(*)-12-AID, 47(*)-104-AID: * each represent a target) in which the TALE (C-terminal domain: WT or 47), the linker 1 (12 amino acids or 104 amino acids), and the deaminase (AID) were arranged in this order from the N-terminus was prepared by the Golden Gate method in the same manner as in 3. except that each of the above-described array plasmids was used. In addition, each expression plasmid (BE4-TALE expression plasmid, ABE8e-TALE expression plasmid) of a TALE-deaminase (BE4-32-47(*), BE4-135-63(*), ABE8e-135-47(*): * each represent a target) in which the deaminase (BE4 or ABE8e), the linker 1 (32 amino acids or 135 amino acids), and the TALE (C-terminal domain: 63 or 47) were arranged in this order from the N-terminus by the Golden Gate method in the same manner as in 8. except that each array plasmid was used. The targeted TALE recognition sequences are shown in Table 13, and a list of the targets, the configurations of the TALE-deaminases, and SEQ ID NOs showing the sequences thereof (SEQ ID NOs of the base sequences and SEQ ID NOs of the amino acid sequence) in the respective expression plasmids prepared is shown in Table 14.

TABLE 13

| | TALE recognition | |
|---|---|---|
| TALE | sequence (5′ -3′) | SEQ ID NO |
| TALE-AS3 | tGAGCCCAGAAGGGGACA | 143 |
| TALE-AS14-1 | tAGCTTGGtCCAACCTGT | 144 |
| TALE-AS14-2 | EGGTCAACCTGTTAGAGC | 145 |
| TALE-AS14-3 | tCTAACAGGTTGGACCAA | 146 |
| TALE-AS5 | LGCAGTAGCTCTAACAGG | 147 |
| TALE-AS6 | tCTGCCGTTACTGCCCTG | 148 |
| TALE-AS7 | tTTGCCACACTGAGTGAG | 149 |
| TALE-S2 | tGCCACACTGAGTGAGC | 150 |

TABLE 14

| | | | TALE | Length of | | |
|---|---|---|---|---|---|---|
| | | Name of | C-terminal | linker 1 | | SEQ |
| ID | Target | TALE | domain | (a.a.) | Deaminase | ID NO |
| WT(AS3)-12-AID | AS3 | TALE-AS3 | WT | 12 | PmCDA1 | 151, 152 |
| 47(AS3)-104-AID | | | 47 | 104 | | 153, 154 |
| WT(AS14-1)-12-AID | AS14 | TALE-AS14-1 | WT | 12 | | 155, 156 |
| 47(AS14-1)-104-AID | | | 47 | 104 | | 157, 158 |
| 47(AS14-2)-12-AID | | TALE-AS14-2 | 47 | 12 | | 159, 160 |
| WT(S2)-12-AID | S2 | TALE-S2 | WT | 12 | | 161, 162 |
| 47(S2)-104-AID | | | 47 | 104 | | 163, 164 |
| BE4-32-47(AS14-3) | AS14 | TALE-AS14-3 | 47 | 32 | Anc689 | 165, 166 |
| BE4-135-63(AS14-3) | | | 63 | 135 | | 167, 168 |
| BE4-32-47(AS5) | AS5 | TALE-AS5 | 47 | 32 | | 169, 170 |
| BE4-135-63(AS5) | | | 63 | 135 | | 171, 172 |
| BE4-32-47(AS6) | AS6 | TALE-AS6 | 47 | 32 | | 173, 174 |
| BE4-135-63(AS6) | | | 63 | 135 | | 175, 176 |
| BE4-32-47(AS7) | AS7 | TALE-AS7 | 47 | 32 | | 177, 178 |
| BE4-135-63(AS7) | | | 63 | 135 | | 179, 180 |
| ABE8e-135-47(AS5) | AS5 | TALE-AS5 | 47 | 135 | TadA-8e | 181, 182 |
| ABE8e-135-47(AS6) | AS6 | TALE-AS6 | | | (V106W) | 183, 134 |
| ABE8e-135-47(AS7) | AS7 | TALE-AS7 | | | | 185, 186 |

[0255] 10. Preparation of Reporter Plasmids for BE4-TALE and ABE8e-TALE

[0256] As reporters, reporter plasmids for BE4-TALE and ABE8e-TALE were prepared by inserting sequences (N-CBE (for BE4-TALE) or N-ABE (for ABE8e-TALE)) shown in Table 15 given below into pNLF-M/A prepared in 1. The insertion sequence contained a complementary sequence of the TALE recognition sequence (the underline (*1): 5′-CCTTTGCCCGCTTCTGTa-3′ in Table 15; the lower-case letter indicates a complementary base of thymine recognized by the N-terminal domain of TALE), a target codon (the underline (*2): 5′-ACG-3′ or 5′-TAG-3′ in Table 15), and a spacer 1 sequence therebetween, and the length of the spacer 1 was set to 7 bp, 13 bp, 19 bp, 25 bp, or 31 bp containing the base at 5′ of the target codon. The sequences inserted in the pNLF-M/A plasmid are shown in Table 15 given below.

TABLE 15

| | | SEQ |
|---|---|---|
| | | ID |
| Products | Sequence (5′-3′) | NO |
| N-CBE-7 | CTAGCATAAAACCTTTGCCCGCTTCTGTa^{*1} | 187 |
| bp | GGGAAGACG^{*2}GATATCTCCTGCGGGG^{*3} | |
| | GAGCT | |
| N-CBE-13 | CTAGCATAAAACCTTTGCCCGCTTCTGTa^{*1} | 188 |
| bp | CTATTTGGGAAGACG^{*2} | |
| | GATATCTCCTGCGGGG^{*3} | |
| | GAGCT | |
| N-CBE-19 | CTAGCATAAAACCTTTGCCCGCTTCTGTa^{*1} | 189 |
| bp | ATTAGTCTATTTGGGAAGACG^{*2} | |
| | GATATCTCCTGCGGGG^{*3}GAGCT | |
| N-CBE-25 | CTAGCATAAAACCTTTGCCCGCTTCTGTa^{*1} | 190 |
| bp | TTCAGGATTAGTCTATTTGGGAAGACG^{*2} | |
| | GATATCTCCTGCGGGG^{*3}GAGCT | |
| N-CBE-31 | CTAGCATAAAACCTTTGCCCGCTTCTGTa^{*1} | 191 |
| bp | AGTCTATTCAGGATTAGTCTATTTGGGAAGACG^{*2} | |
| | GATATCTCCTGCGGGG^{*3}GAGCT | |
| N-ABE-7 | CTAGCACCATGGCGCCTTTGCCCGCTTCTGTa^{*1} | 192 |
| bp | CGCGCTTAG^{*2}TCTTTCGGC | |
| N-ABE-13 | CTAGCACCATGGCGCCTTTGCCCGCTTCTGTa^{*1} | 193 |
| bp | GCCTCCCGCGCTTAG^{*2}TCTTTCGGC | |
| N-ABE-19 | CTAGCACCATGGCGCCTTTGCCCGCTTCTGTa^{*1} | 194 |
| bp | CCCAACGCCTCCCGCGCTTAG^{*2}TCTTTCGGC | |
| N-ABE-25 | CTAGCACCATGGCGCCTTTGCCCGCTTCTGTa^{*1} | 195 |
| bp | GCAGGCCCCAACGCCTCCCGCGCTTAG^{*2}TCTTT | |
| | CGGC | |
| N-ABE-31 | CTAGCACCATGGCGCCTTTGCCCGCTTCTGTa^{*1} | 196 |
| bp | GCTGGAGCAGGCCCCAACGCCTCCCGCGCTTAG^{*2} | |
| | TCTTTCGGC | |

^{*1}Complementary sequence of TALE recognition sequence
^{*2}Target codon containing target base
^{*3}PAM

[0257] In this reporter plasmid for BE4-TALE, the target codon was located at a position corresponding to the start codon of Nano luciferase, and this reporter plasmid expresses NanoLuc luciferase when ACG, which is the target codon, is converted to ATG (C, which is the target base (target site), is substituted with T) by the TALE-deaminase bound to the TALE recognition sequence (FIG. 10). On the other hand, in the reporter plasmid for ABE8e-TALE, the target codon is located at a position corresponding to the termination codon inserted upstream of NanoLuc luciferase, and this reporter plasmid expresses NanoLuc luciferase when TAG, which is the target codon, is converted to TGG (A, which is the target base (target site), is substituted with G) by the TALE-deaminase bound to the TALE recognition sequence.

[0258] 11. Preparation of Guide RNA Expression Plasmids (2)

[0259] A Plasmid (guide RNA expression plasmid) expressing each guide RNAs was prepared in the same manner as in 5. except that the plasmid expressing the guide RNA was designed to correspond to the target sequence (complementary sequences of the target sequences (on the antisense strand) of the guide RNAs are shown in Table 16) of the guide RNA. The complementary sequences of the target sequences of the guide RNAs are shown in Table 16 given below.

TABLE 16

| | | Complementary | |
|---|---|---|---|
| | | sequence of target | SEQ |
| | | sequence of | ID |
| Guide RNA | Target | guide RNA | NO |
| sgRNA-N- | Reporter | GAAGACGGATATCTCCTGCG | 197 |
| CBE | for | | |
| | BE4-TALE | | |
| sgRNA-N- | Reporter | GCTTAGTCTTTCGGCTCGAG | 198 |
| ABE | for | | |
| | ABE8e- | | |
| | TALE | | |
| sgRNA-AS3 | AS3 | CAGAGATGGCCAGGTTGAGC | 199 |
| sgRNA-AS14 | AS14 | CAGGCCAAAGAATTCCTGGA | 200 |
| sgRNA-AS5 | AS5 | AGAATTCCTGGAAGGTGTTC | 201 |
| sgRNA-AS6 | AS6 | TGCACCATGGTGTCTGTTTG | 202 |
| sgRNA-AS7 | AS7 | GTGAGCCAGGCCATCACTAA | 203 |
| sgRNA-S2 | S2 | CGTGGATCCTGAGAACTTCA | 204 |

[0260] 12. Transformation to HEK Cells (2)

[0261] In the case where each of the reporter plasmids prepared in the above 10. was used as the target DNA, the same method as shown in 6. was conducted. Specifically, into 5×10⁴ HEK293 T-cells in each well, 75 ng of one of the BE4-TALE expression plasmids and the ABE8e-TALE expression plasmids prepared in 8.; 50 ng of the nCas9 expression plasmid or dCas9 expression plasmid prepared in 4.; 10 ng of the guide RNA expression plasmid prepared in 11. or 20 ng of one of the reporter plasmids prepared in 10.; and 5 ng of pGL4.54, which is the reference plasmid, were introduced by using Lipofectamine LTX, followed by culturing for 24 hours.

[0262] In addition, in the case where the endogenous DNA described in the above 9. was used as the target DNA, the following was conducted. Specifically, a combination of 30 ng of one of the TALE-AID expression plasmids prepared in 9.; 20 ng of the nCas9 expression plasmid or the dCas9 expression plasmid prepare in 4.; and 5 ng of the guide RNA expression plasmid prepared in 11. in the case where AID was used as the deaminase, and a combination of 60 ng of one of the BE4-TALE expression plasmid or the ABE8e-TALE expression plasmid prepared in 9.; 40 ng of the nCas9 expression plasmid or dCas9 expression plasmid prepared in 4.; and 10 ng of the guide RNA expression plasmid prepared in 11. in the case where BE4 or ABE8e was used as the deaminase, were each introduced into 3×10⁴ HEK293 T-cells per well, followed by culturing for 48 hours. In addition, as the control in this case, one of a combination of 30 ng of one of the Target-AID expression plasmid, the AncBE4max expression plasmid, and the ABE8e expression plasmid and 10 ng of the guide RNA expression plasmid prepared in 11., or a combination of 60 ng of one of the Target-AID expression plasmid, the AncBE4max expression plasmid, and the ABE8e expression plasmid and 20 ng of the guide RNA expression plasmid prepared in 11. was introduced into the HEK293 T-cells.

[0263] 13. Analysis of the Base Editing Activity

[0264] The medium was removed 48 hours after the transformation, followed by washing with PBS(−), and thereafter, 50 μL of DNAzol (Molecular Research Center, INC., Ohio, USA) was added to dissolve the cells. The region containing the target site of the endogenous DNA was amplified by using PrimeSTAR Max (Takara Bio Inc., Siga, Japan) using the primers described in Table 17 given below with cell lysates as a template. After the PCR product thus obtained was purified, the sequence was outsourced to FASMAC. Sequence data were analyzed by using EditR (Kluesner et al., The CRISPR J 1, p. 239-250 (2018), DOI: 10.1089/crispr.2018.0014) to calculate the base editing efficiency (proportion of T or G) of the target site.

TABLE 17

| | Target | Forward Primer | SEQ | Reverse Primer | SEQ |
|---|---|---|---|---|---|
| Target | gene | (5′-3′) | ID NO | (5′-3′) | ID NO |
| AS3 | CCR5 | CCR5-AS3-F2 | 205 | CCR5-AS3-R2 | 206 |
| | CCR2 | CCR2-AS3-F | 207 | CCR2-AS3-R | 208 |
| AS14/AS5 | CCR5 | CCR5-AS14-F1 | 209 | CCR5-AS14-R | 210 |
| | CCR2 | CCR2-AS14-F1 | 211 | CCR2-AS14-R1 | 212 |
| AS6 | HBB | HBB-AS6-F2 | 213 | HBB-AS6-R2 | 214 |
| | HBD | HBD-AS6-F | 215 | HBD-AS6-R | 216 |
| AS7/S2 | HBB | HBB-S2-F | 217 | HBB-S2-R | 218 |
| | HBD | HBD-S2-F | 219 | HBD-S2-R | 220 |

[0265] <Test 5> Effects of the Length of the Spacer 1 and the Length of the Linker 1 on the Activity of the TALE-Deaminase (N-Terminal Fusion Product)

[0266] Transformation to HEK cells was conducted by the above 12., and TALE-deaminase activity values (proportions to the AncBE4max activity values or the ABE8e activity values) were obtained by the above 7.

[0267] (BE4 Series)

[0268] For the TALE-deaminase (BE4-TALE-WT, BE4-TALE-63, or BE4-TALE-47) in which the Anc689 deaminase (BE4), the linker 1 (32 amino acids, 135 amino acids, or 234 amino acids), and the TALE (C-terminal domain: WT, 63, or 47) were arranged in this order from the N-terminus, the effects of the length of the spacer 1 and the length of the linker 1 of the reporter on the activity were examined. The length of the spacer 1 was set to 7 bp, 13 bp, 19 bp, 25 bp, and 31 bp. In addition, as Cas9/guide RNA, three conditions where nCas9 (D10A) and the guide RNA were expressed (nCas9), where dCas9 (D10A+H840A) and the guide RNA were expressed (dCas9), where nCas9 was expressed and the guide RNA was not expressed (nCas9/no guide) were studied.

[0269] Results are shown in (A) and (B) of FIG. 12A and (C) of FIG. 12B. In any of BE4-TALE, in the case where there was no guide RNA, that is, in the case where nCas9 was not bound in the vicinity of the target base, no activity was observed. On the other hand, the activity was observed in the presence of nCas9 or dCas9. The effects to promote the activity of nicks by nCas9 were not as significant as the C-terminal fusion product of TALE-deaminase (the deaminase was arranged on the C-terminal side).

[0270] Regarding the length of the spacer 1, particularly high activity was observed when the length was 25 bp in the case where the C-terminal domain of the TALE was WT and 63, and when the length was 19 bp and 25 bp in the case where the C-terminal domain of the TALE was 47. Regarding the length of the linker 1, particularly high activity was observed when the length was 32 amino acids in the case where the C-terminal domain of the TALE was WT and 47, and when the length was 135 amino acids in the case where the C-terminal domain of the TALE was 63. Combinations with particularly high activities were the case where the length of the linker 1 was 32 amino acids and the length of the spacer 1 was 25 bp in the case where the C-terminal domain of the TALE was WT (0.75±0.10), the case where the length of the linker 1 was 135 amino acids and the length of the spacer 1 was 25 bp in the case where the C-terminal domain of the TALE was 63 (0.86±0.11), and the case where the length of the linker 1 was 32 amino acids and the length of the spacer 1 was 19 bp and 25 bp in the case where the C-terminal domain of the TALE was 47 (0.80±0.14 and 0.85±0.13).

[0271] (ABE8e Series)

[0272] For the TALE-deaminase (ABE8e-TALE-47) in which the ABE8e deaminase (ABE8e), the linker 1 (32 amino acids, 135 amino acids, or 234 amino acids), and the TALE (C-terminal domain: 47) were arranged in this order from the N-terminus as well, the effects of the length of the spacer 1 and the length of the linker 1 of the reporter on the activity were examined in the same manner as for the above BE4 series.

[0273] Results are shown in (D) of FIG. 12B. In any of ABE8e-TALE, in the case where there was no guide RNA, that is, in the case where nCas9 was not bound in the vicinity of the target base, no activity was observed. On the other hand, the activity was observed in the presence of nCas9 or dCas9. Note that in comparison between nCas9 and dCas9, the activity was at a similar level, or rather higher in the case of dCas9.

[0274] Regarding the length of the spacer 1, particularly high activity was observed when the length was 19 bp. Regarding the length of the linker 1, particularly high activity was observed when the length was 135 amino acids (0.54±0.03) in the case of nCas9, and when the length was 32 amino acids (0.55±0.13) and 135 amino acids (0.57±0.09) in the case of dCas9.

[0275] <Test 6> the Base Editing Activity in Endogenous DNA

[0276] For the TALE-deaminases with which particularly high activity was obtained in the above examination, the base editing activity on the endogenous DNAs was examined by the methods described in the above 12. and 13. As the endogenous DNAs, CCR5 and HBB for which family genes with high homology (CCR2 and HBD) exist were set. Target regions (AS3 (a: SEQ ID NO: 221), AS14 (b: SEQ ID NO: 222) (e: SEQ ID NO: 225), S2 (c: SEQ ID NO: 223), AS5 (d: SEQ ID NO: 224), AS6 (f: SEQ ID NO: 226), AS7 (g: SEQ ID NO: 227)) on the endogenous DNAs (CCR5, HBB), the positions of the TALE recognition sequences or complementary sequences thereof, the positions of the complementary sequences of the target sequences of the guide RNA are shown in FIG. 13A and FIG. 13B. In addition, in FIG. 13A and FIG. 13B, bases different from the bases in each region are also shown as alignments of CCR2 having high homology with CCR5 shown in (a), (b), (d), and (e) and HBD having high homology with HBB shown in (c), (f), and (g).

[0277] (AID Series)

[0278] Results of using TALE-AIDs (WT(*)-12-AID, 47(*)-12-AID, and 47(*)-104-AID: * each represents the target) in which the TALE (C-terminal domain: WT or 47), the linker 1 (12 amino acids or 104 amino acids), and the deaminase (AID) were arranged in this order from the N-terminus are shown in FIG. 14 to FIG. 16. In the respective TALE-AIDs, the TALE recognition sequences are located on AS3 (a), AS14 (b), and S2 (c) shown in FIG. 13A, respectively. FIG. 14 shows the proportions of T (that is, the proportions of bases edited from C to T) at the 1st base (A), the 10th base (B), and the 11th base (C) in the complementary sequences of the target sequences of the guide RNA (sgRNA-AS3) on the target AS3, FIG. 15 shows the proportions of T at the 1st base (A), the 5th base (B), and the 6th base (C) in the complementary sequences of the target sequences of the guide RNA (sgRNA-AS14) on the target AS14, and FIG. 16 shows the proportions of T at the 1st base (A), the 8th base (B), and the 9th base (C) in the complementary sequences of the target sequences of the guide RNA (sgRNA-S2) on the target S2.

[0279] TALE-AID exhibited activity at a level similar to or higher than those of Target-AID and AncBE4max, which are existing Base editors, for the CCR5 gene or the HBB gene, which was the target. On the other hand, although Target-AID and AncBE4max exhibited base editing activity for the CCR2 gene or the HBD gene, which was not the target, TALE-AID exhibited almost no base editing activity. Hence, it was confirmed that TALE-AID had higher target specificity than those of the existing Target-AID or AncBE4max.

[0280] (BE4 Series)

[0281] Results of using BE4-TALEs (BE4-32-47(*) and BE4-135-63(*): * each represents the target) in which the deaminase (BE4), the linker 1 (32 amino acids or 135 amino acids), and the TALE (C-terminal domain: 47 or 63) were arranged from the N-terminus are shown in FIG. 17 to FIG. 20. In each BE4-TALE, the TALE recognition sequences were located on complementary sequences of AS5 (d), AS14 (e), AS6 (f), and AS7 (g) shown in FIG. 13B. FIG. 17 shows the proportions of T at the 7th base (A) and the 8th base (B) in the complementary sequences of the target sequences of the guide RNA (sgRNA-AS5) on the target AS5, FIG. 18 shows the proportions of T at the 1st base (A), the 5th base (B), and the 6th base (C) in the complementary sequences of the target sequences of the guide RNA (sgRNA-AS14) on the target AS14, FIG. 19 shows the proportions of T at the 5th base (A) and the 6th base (B) in the complementary sequences of the target sequences of the guide RNA (sgRNA-AS6) on the target AS6, and FIG. 20 shows the proportions of T at the 6th base (A) and the 7th base (B) in the complementary sequences of the target sequences of the guide RNA (sgRNA-AS7) on the target AS7.

[0282] BE4-TALE exhibited activity at a level substantially similar to those of Target-AID and AncBE4max, which are existing Base editors, for the CCR5 gene or the HBB gene, which was the target. On the other hand, although Target-AID and AncBE4max exhibited base editing activity for the CCR2 gene or HBD gene, which was not the target, BE4-TALE exhibited almost no base editing activity. Hence, it was confirmed that BE4-TALE had higher target specificity than those of the existing Target-AID or AncBE4max.

[0283] (ABE8e Series)

[0284] Results of using ABE8e-TALE (ABE8e-135-47) in which the ABE8e deaminase (ABE8e), the linker 1 (135 amino acids), and the TALE (C-terminal domain: 47) were arranged from the N-terminus are shown in FIG. 21 to FIG. 23. In each ABE8e-TALE, the TALE recognition sequences were located on complementary sequences of AS5 (d), AS6 (f), and AS7 (g) shown in FIG. 13B. FIG. 21 shows the proportions of G (that is, the proportions of bases edited from A to G) at the 3rd base (A) and the 4th base (B) in the complementary sequences of the target sequences of the guide RNA (sgRNA-AS5) on the target AS5, FIG. 22 shows the proportions of G at the 4th base (A) and the 7th base (B) in the complementary sequences of the target sequences of the guide RNA (sgRNA-AS6) on the target AS6, and FIG. 23 shows the proportions of G at the 4th base (A) and the 8th base (B) in the complementary sequences of the target sequences of the guide RNA (sgRNA-AS7) on the target AS7.

[0285] ABE8e-TALE exhibited activity similar to that of ABE8e (TadA-8e(V106W)), which is an existing Base editor, for the CCR5 gene or the HBB gene, which was the target. On the other hand, although ABE8e (TadA-8e(V106W)) exhibited base editing activity for the CCR2 gene or the HBD gene, which was not the target, ABE8e-TALE exhibited almost no base editing activity. Hence, it was confirmed that ABE8e-TALE had higher target specificity than that of the existing ABE8e (TadA-8e(V106W)).

### INDUSTRIAL APPLICABILITY

[0286] As described above, the present invention makes it possible to provide a method capable of specifically and efficiently editing a target DNA by using a nucleic acid base converting enzyme, a method for producing a cell genome-edited by using the method, and a DNA editing system for use in these. Hence, the present invention is expected to be utilized in the fields of gene-editing treatment and the like where high editing efficiency and high safety are required.

### [Sequence Listing] IBPF21-536WO(seq)-fin.txt

1. A method for editing a target DNA, the method comprising:
bringing
(1) a fusion protein comprising a transcription activator-like effector (TALE) and a nucleic acid base converting enzyme and
(2) a CRISPR-Cas9 system comprising a Cas9 protein which has lost a part or all of a nuclease activity and a guide RNA thereof
into contact with a target DNA such that the nucleic acid base converting enzyme edits a base in a target site of the target DNA, wherein
a TALE recognition sequence recognized by the TALE in the fusion protein or a complementary sequence thereof is present on a 5′ side of the target site via a spacer 1 having a chain length of 7 to 31 bp, and
a guide RNA-target sequence recognized by the guide RNA in the CRISPR-Cas9 system includes a complementary base of the target site.

2. A method for producing a cell in which a target DNA is edited, the method comprising:
introducing into a cell or expressing in a cell
(1) a fusion protein comprising a transcription activator-like effector (TALE) and a nucleic acid base converting enzyme and
(2) a CRISPR-Cas9 system comprising a Cas9 protein which has lost a par or all of a nuclease activity and a guide RNA thereof
to bring the fusion protein and the CRISPR-Cas9 system into contact with a target DNA such that the nucleic acid base converting enzyme edits a base in a target site of the target DNA, wherein
a TALE recognition sequence recognized by the TALE in the fusion protein or a complementary sequence thereof is present on a 5′ side of the target site via a spacer 1 having a chain length of 7 to 31 bp, and
a guide RNA-target sequence recognized by the guide RNA in the CRISPR-Cas9 system includes a complementary base of the target site.

3. The method according to claim 1, wherein
the fusion protein further comprises a linker 1 which binds the TALE and the nucleic acid base converting enzyme.

4. The method according to claim 1, wherein
the fusion protein further comprises a base excision repair inhibitor which is bound to a C-terminal side via a linker 2.

5. The method according to claim 1, wherein
the nucleic acid base converting enzyme in the fusion protein is a deaminase.

6. The method according to claim 5, wherein
the deaminase is at least one selected from the group consisting of APOBEC, PmCDA1, Anc689, and TadA.

7. A DNA editing system, comprising:
(1) a fusion protein comprising a TALE and a nucleic acid base converting enzyme; and
(2) a CRISPR-Cas9 system comprising a Cas9 protein which has lost a part or all of a nuclease activity and a guide RNA thereof.

8. The DNA editing system according to claim 7, wherein
the fusion protein further comprises a linker 1 which binds the TALE and the nucleic acid base converting enzyme.

9. The DNA editing system according to claim 7, wherein
the fusion protein further comprises a base excision repair inhibitor which is bound to a C-terminal side via a linker 2.

10. The DNA editing system according to claim 7, wherein
the nucleic acid base converting enzyme in the fusion protein is a deaminase.

11. The DNA editing system according to claim 10, wherein
the deaminase is at least one selected from the group consisting of APOBEC, PmCDA1, Anc689, and TadA.

12. The method according to claim 2, wherein
the fusion protein further contains comprises a linker 1 which binds the TALE and the nucleic acid base converting enzyme.

13. The method according to claim 2, wherein
the fusion protein further comprises a base excision repair inhibitor which is bound to a C-terminal side via a linker 2.

14. The method according to claim 2, wherein
the nucleic acid base converting enzyme in the fusion protein is a deaminase.

15. The method according to claim 14, wherein
the deaminase is at least one selected from the group consisting of APOBEC, PmCDA1, Anc689, and TadA.

The application's sequence listing, which the Patent Office published only in electronic form, follows.

SEQUENCE LISTING (227 sequences)

SEQ ID NO: 1 - DNA, 43 bp, Artificial Sequence
  BEtag-7bp
cataaaatacagaagcgggcaaagggggaagacggatatctcc

SEQ ID NO: 2 - DNA, 49 bp, Artificial Sequence
  BEtag-13bp
cataaaatacagaagcgggcaaaggctatttgggaagacggatatctcc

SEQ ID NO: 3 - DNA, 55 bp, Artificial Sequence
  BEtag-19bp
cataaaatacagaagcgggcaaaggattagtctatttgggaagacggatatctcc

SEQ ID NO: 4 - DNA, 61 bp, Artificial Sequence
  BEtag-25bp
cataaaatacagaagcgggcaaaggttcaggattagtctatttgggaagacggatatctcc

SEQ ID NO: 5 - DNA, 67 bp, Artificial Sequence
  BEtag-31bp
cataaaatacagaagcgggcaaaggagtctattcaggattagtctatttgggaagacggatatctcc

SEQ ID NO: 6 - DNA, 24 bp, Artificial Sequence
  PAM
atctcctgcagggggggggccggc

SEQ ID NO: 7 - DNA, 23 bp, Artificial Sequence
  anc689deaminase_F
agctccgagacaggaccagtggc

SEQ ID NO: 8 - DNA, 40 bp, Artificial Sequence
  anc689deaminase_R_inf10aa
tccagatcctccggacttcaggccggttgcccacaggatg

SEQ ID NO: 9 - DNA, 24 bp, Artificial Sequence
  PmCDA1_F
atgaccgacgccgagtatgtgcgg

SEQ ID NO: 10 - DNA, 40 bp, Artificial Sequence
  PmCDA1_R_inf10aa
tccagatcctccggatcccactgctgggctctttgtggtg

SEQ ID NO: 11 - DNA, 20 bp, Artificial Sequence
  10aa_F
tccggaggatctggaggaag

SEQ ID NO: 12 - DNA, 29 bp, Artificial Sequence
  Amp_F
ccataaccatgagtgataacactgcggcc

SEQ ID NO: 13 - DNA, 39 bp, Artificial Sequence
  104aa_F_infWT
cgcgcgtcagccagcagcagggcagatcccaagaagaag

SEQ ID NO: 14 - DNA, 39 bp, Artificial Sequence
  104aa_F_inf47
gaattgatcagatccagcagggcagatcccaagaagaag

SEQ ID NO: 15 - DNA, 40 bp, Artificial Sequence
  AID_R3_infAnc689
tcctgtctcggagctgccagacttatcgtcatcgtccttg

SEQ ID NO: 16 - DNA, 39 bp, Artificial Sequence
  104aa_F_inf63
cgagtggcaggttccagcagggcagatcccaagaagaag

SEQ ID NO: 17 - DNA, 40 bp, Artificial Sequence
  AID_R3_infCDA1
ctcggcgtcggtcatgccagacttatcgtcatcgtccttg

SEQ ID NO: 18 - DNA, 46 bp, Artificial Sequence
  12aa_infWT
cgcgcgtcagccagcgctagccccaagaagaagagaaaggtggagg

SEQ ID NO: 19 - DNA, 46 bp, Artificial Sequence
  12aa_inf63
cgagtggcaggttccgctagccccaagaagaagagaaaggtggagg

SEQ ID NO: 20 - DNA, 46 bp, Artificial Sequence
  12aa_inf47
gaattgatcagatccgctagccccaagaagaagagaaaggtggagg

SEQ ID NO: 21 - DNA, 41 bp, Artificial Sequence
  12aa_infCDA1
ctcggcgtcggtcatgctggcctccacctttctcttcttct

SEQ ID NO: 22 - DNA, 24 bp, Artificial Sequence
  TALE_WT_R
gctggctgacgcgcgagtttggtc

SEQ ID NO: 23 - DNA, 26 bp, Artificial Sequence
  TALE_63_R
ggaacctgccactcgatgtgatgtcc

SEQ ID NO: 24 - DNA, 24 bp, Artificial Sequence
  TALE_47_R
ggatctgatcaattccggcgcgtg

SEQ ID NO: 25 - DNA, 24 bp, Artificial Sequence
  Amp_R
cactcatggttatggcagcactgc

SEQ ID NO: 26 - DNA, 42 bp, Artificial Sequence
  12aa_R_infCDA1
ctcggcgtcggtcattcctactttccgcttcttcttgggatc

SEQ ID NO: 27 - DNA, 41 bp, Artificial Sequence
  24aa_R_infCDA1
ctcggcgtcggtcatgtactcggcggagcctcctcctccgg

SEQ ID NO: 28 - DNA, 43 bp, Artificial Sequence
  36aa_R_infCDA1
ctcggcgtcggtcatctcgtcattgccgttgaagtcgaacagg

SEQ ID NO: 29 - DNA, 42 bp, Artificial Sequence
  48aa_R_infCDA1
ctcggcgtcggtcattccgcaggatgtcgcccttcttgaatg

SEQ ID NO: 30 - DNA, 40 bp, Artificial Sequence
  60aa_R_infCDA1
ctcggcgtcggtcatggcgttccaccactgctcctcgggc

SEQ ID NO: 31 - DNA, 42 bp, Artificial Sequence
  84aa_R_infCDA1
ctcggcgtcggtcatgtccttgtaatcgccgctatacttctc

SEQ ID NO: 32 - DNA, 17 bp, Artificial Sequence
  NC
ttgcgcgtatagtcgcg

SEQ ID NO: 33 - DNA, 4377 bp, Artificial Sequence
  WT-104-BE4
atggactataaggaccacgacggagactacaaggatcatgatattgattacaaagacgatgacgataagatggccccaaagaagaagcggaaggtcggtatccacggagtcccagcagccgtagatttgagaactttgggatattcacagcagcagcaggaaaagatcaagcccaaagtgaggtcgacagtcgcgcagcatcacgaagcgctggtgggtcatgggtttacacatgcccacatcgtagccttgtcgcagcaccctgcagcccttggcacggtcgccgtcaagtaccaggacatgattgcggcgttgccggaagccacacatgaggcgatcgtcggtgtggggaaacagtggagcggagcccgagcgcttgaggccctgttgacggtcgcgggagagctgagagggcctccccttcagctggacacgggccagttgctgaagatcgcgaagcggggaggagtcacggcggtcgaggcggtacacgcgtggcgcaatgcgctcacgggagcacccctcaacctgaccccagaccaggttgtggccatcgccagcaacataggtggcaagcaggccctcgaaaccgtccagagactgttaccggttctctgccaggaccacggcctgaccccggaacaggtggttgcaatcgcgtcacacgatgggggaaagcaggccctagaaaccgttcagcgactcctgcccgtcctgtgccaggcccacggcctgaccccagaccaggttgtggccatcgccagcaacataggtggcaagcaggccctcgaaaccgtccagagactgttaccggttctctgccaggcccacggcctgaccccagcccaagttgtcgcgattgcaagcaacaacggaggcaaacaagccttagaaacagtccagagattgttgccggtgctgtgccaagaccacggcctgaccccagaccaggttgtggccatcgccagcaacataggtggcaagcaggccctcgaaaccgtccagagactgttaccggttctctgccaggaccacggcctgaccccagaacaggttgtggccatcgccagcaacataggtggcaagcaggccctcgaaaccgtccagagactgttaccggttctctgccaggcccacggcctgaccccagaccaagttgtcgcgattgcaagcaacaacggaggcaaacaagccttagaaacagtccagagattgttgcctgtgctgtgccaagcccacggcctgaccccggcccaggtggttgcaatcgcgtcacacgatgggggaaagcaggccctagaaaccgttcagcgactcctgcccgtcctgtgccaggaccacggcctgaccccagaccaagttgtcgcgattgcaagcaacaacggaggcaaacaagccttagaaacagtccagagattgttgccggtgctgtgccaagaccacggcctgaccccagaacaagttgtcgcgattgcaagcaacaacggaggcaaacaagccttagaaacagtccagagattgttgccggtgctgtgccaagcccacggcctgaccccagaccaagttgtcgcgattgcaagcaacaacggaggcaaacaagccttagaaacagtccagagattgttgcctgtgctgtgccaagcccacggcctgaccccggcccaggtggttgcaatcgcgtcacacgatgggggaaagcaggccctagaaaccgttcagcgactcctgcccgtcctgtgccaggaccacggcctgaccccagaccaggttgtggccatcgccagcaacataggtggcaagcaggccctcgaaaccgtccagagactgttaccggttctctgccaggaccacggcctgaccccagaacaggttgtggccatcgccagcaacataggtggcaagcaggccctcgaaaccgtccagagactgttaccggttctctgccaggcccacggcctgaccccagaccaggttgtggccatcgccagcaacataggtggcaagcaggccctcgaaaccgtccagagactgttaccggttctctgccaggcccacggcctgaccccagcccaagttgtcgcgattgcaagcaacaacggaggcaaacaagccttagaaacagtccagagattgttgccggtgctgtgccaagaccacggcctgacccctgagcaggtagtggctattgcatccaacaacgggggcagacccgcactggagtcaatcgtggcccagctctcgaggccggaccccgcgctggccgcactcactaatgatcatcttgtagcgctggcctgcctcggcggacgacccgccttggatgcggtgaagaaggggctcccgcacgcgcctgcattgattaagcggaccaacagaaggatccccgagaggacatcacatcgagtggcagatcacgcgcaagtggtccgcgtgctcggattcttccagtgtcactcccaccccgcacaagcgttcgatgacgccatgactcaatttggtatgtcgagacacggactgctgcagctctttcgtagagtcggtgtcacagaactggaggcccgctcgggcacactgcctcccgcctcccagcggtgggacaggattctccaagcgagcggtatgaaacgcgcgaagccttcacctacgtcaactcagacacctgaccaggcgagccttcatgcgttcgcagactcgctggagagggatttggacgcgccctcgcccatgcatgaaggggaccaaactcgcgcgtcagccagcagcagggcagatcccaagaagaagcggaaagtaggaggaggaggaaccggaggaggaggctccgccgagtacgtgagggccctgttcgacttcaacggcaatgacgaggaggatctgccattcaagaagggcgacatcctgcggatcagagataagcccgaggagcagtggtggaacgccgaggactctgagggcaagcgcggcatgatcctggtgccttacgtggagaagtatagcggcgattacaaggaccacgatggcgactataaggatcacgacatcgattacaaggacgatgacgataagtctggcagctccgagacaggaccagtggcagtggaccctacactgcggagaaggatcgagcctcacgagtttgaggtgttctttgatccaagagagctgaggaaggagacatgcctgctgtacgagatcaagtggggcacatctcacaagatctggcgccactctagcaagaacaccacaaagcacgtggaagtgaatttcatcgagaagtttaccagcgagcggcacttctgccctagcacctcctgttctatcacatggtttctgagctggtccccatgcggcgagtgtagcaaggccatcaccgagttcctgtcccagcacccaaacgtgaccctggtcatctacgtggccaggctgtatcaccacatggaccagcagaacaggcagggcctgcgggatctggtgaattccggcgtgaccatccagatcatgacagcccccgagtacgattactgttggagaaacttcgtgaactacccacctggcaaggaggcacactggcctaggtacccacccctgtggatgaagctgtatgcactggagctgcacgcaggaatcctgggcctgcctccatgcctgaatatcctgcgccggaagcagccccagctgaccttctttacaatcgccctgcagagctgtcactaccagcggctgccacctcacatcctgtgggcaaccggcctgaagtccggaggatctggaggaagcggaggatccaccaacctgtctgacatcatcgagaaggagacaggcaagcagctggtcatccaggagagcatcctgatgctgcccgaggaggtggaggaagtgatcggcaacaagcctgagtccgatatcctggtgcacaccgcctacgacgagtccacagatgagaatgtgatgctgctgacctctgacgccccagagtataagccctgggccctggtcatccaggatagcaacggcgagaataagatcaagatgctgtccggcggaagcggaggatccggaggctctaccaatctgtccgatattattgaaaaagagacaggcaagcaactggtcatccaggagtctatcctgatgctgccagaagaagtcgaagaagtgatcggaaacaagcccgaaagcgacatcctggtccatactgcctacgacgagagtaccgacgaaaatgtgatgttactgacctccgacgcccctgagtataagccatgggctctggtcatccaggactccaatggagaaaataagatcaagatgttaagcggcggctccaagagaacagccgacggctccgagttcgagcccaagaagaagcggaaagtg

SEQ ID NO: 34 - protein, 1459 aa, Artificial Sequence
  WT-104-BE4
MDYKDHDGDYKDHDIDYKDDDDKMAPKKKRKVGIHGVPAAVDLRTLGYSQQQQEKIKPKVRSTVAQHHEALVGHGFTHAHIVALSQHPAALGTVAVKYQDMIAALPEATHEAIVGVGKQWSGARALEALLTVAGELRGPPLQLDTGQLLKIAKRGGVTAVEAVHAWRNALTGAPLNLTPDQVVAIASNIGGKQALETVQRLLPVLCQDHGLTPEQVVAIASHDGGKQALETVQRLLPVLCQAHGLTPDQVVAIASNIGGKQALETVQRLLPVLCQAHGLTPAQVVAIASNNGGKQALETVQRLLPVLCQDHGLTPDQVVAIASNIGGKQALETVQRLLPVLCQDHGLTPEQVVAIASNIGGKQALETVQRLLPVLCQAHGLTPDQVVAIASNNGGKQALETVQRLLPVLCQAHGLTPAQVVAIASHDGGKQALETVQRLLPVLCQDHGLTPDQVVAIASNNGGKQALETVQRLLPVLCQDHGLTPEQVVAIASNNGGKQALETVQRLLPVLCQAHGLTPDQVVAIASNNGGKQALETVQRLLPVLCQAHGLTPAQVVAIASHDGGKQALETVQRLLPVLCQDHGLTPDQVVAIASNIGGKQALETVQRLLPVLCQDHGLTPEQVVAIASNIGGKQALETVQRLLPVLCQAHGLTPDQVVAIASNIGGKQALETVQRLLPVLCQAHGLTPAQVVAIASNNGGKQALETVQRLLPVLCQDHGLTPEQVVAIASNNGGRPALESIVAQLSRPDPALAALTNDHLVALACLGGRPALDAVKKGLPHAPALIKRTNRRIPERTSHRVADHAQVVRVLGFFQCHSHPAQAFDDAMTQFGMSRHGLLQLFRRVGVTELEARSGTLPPASQRWDRILQASGMKRAKPSPTSTQTPDQASLHAFADSLERDLDAPSPMHEGDQTRASASSRADPKKKRKVGGGGTGGGGSAEYVRALFDFNGNDEEDLPFKKGDILRIRDKPEEQWWNAEDSEGKRGMILVPYVEKYSGDYKDHDGDYKDHDIDYKDDDDKSGSSETGPVAVDPTLRRRIEPHEFEVFFDPRELRKETCLLYEIKWGTSHKIWRHSSKNTTKHVEVNFIEKFTSERHFCPSTSCSITWFLSWSPCGECSKAITEFLSQHPNVTLVIYVARLYHHMDQQNRQGLRDLVNSGVTIQIMTAPEYDYCWRNFVNYPPGKEAHWPRYPPLWMKLYALELHAGILGLPPCLNILRRKQPQLTFFTIALQSCHYQRLPPHILWATGLKSGGSGGSGGSTNLSDIIEKETGKQLVIQESILMLPEEVEEVIGNKPESDILVHTAYDESTDENVMLLTSDAPEYKPWALVIQDSNGENKIKMLSGGSGGSGGSTNLSDIIEKETGKQLVIQESILMLPEEVEEVIGNKPESDILVHTAYDESTDENVMLLTSDAPEYKPWALVIQDSNGENKIKMLSGGSKRTADGSEFEPKKKRKV

SEQ ID NO: 35 - DNA, 4377 bp, Artificial Sequence
  WT-104-BE4-NC
atggactataaggaccacgacggagactacaaggatcatgatattgattacaaagacgatgacgataagatggccccaaagaagaagcggaaggtcggtatccacggagtcccagcagccgtagatttgagaactttgggatattcacagcagcagcaggaaaagatcaagcccaaagtgaggtcgacagtcgcgcagcatcacgaagcgctggtgggtcatgggtttacacatgcccacatcgtagccttgtcgcagcaccctgcagcccttggcacggtcgccgtcaagtaccaggacatgattgcggcgttgccggaagccacacatgaggcgatcgtcggtgtggggaaacagtggagcggagcccgagcgcttgaggccctgttgacggtcgcgggagagctgagagggcctccccttcagctggacacgggccagttgctgaagatcgcgaagcggggaggagtcacggcggtcgaggcggtacacgcgtggcgcaatgcgctcacgggagcacccctcaacctgacccccgaccaggttgtcgctattgctagtaacggcggaggcaaacaggcgctggaaacagttcagcgcctcttgccggtcttgtgtcaggaccacggcctgaccccagaacaagttgtcgcgattgcaagcaacaacggaggcaaacaagccttagaaacagtccagagattgttgccggtgctgtgccaagcccacggcctgaccccggaccaggtggttgcaatcgcgtcacacgatgggggaaagcaggccctagaaaccgttcagcgactcctgcccgtcctgtgccaggcccacggcctgaccccagcccaagttgtcgcgattgcaagcaacaacggaggcaaacaagccttagaaacagtccagagattgttgccggtgctgtgccaagaccacggcctgaccccggaccaggtggttgcaatcgcgtcacacgatgggggaaagcaggccctagaaaccgttcagcgactcctgcccgtcctgtgccaggaccacggcctgaccccagaacaagttgtcgcgattgcaagcaacaacggaggcaaacaagccttagaaacagtccagagattgttgccggtgctgtgccaagcccacggcctgacccccgaccaggttgtcgctattgctagtaacggcggaggcaaacaggcgctggaaacagttcagcgcctcttgccggtcttgtgtcaggcccacggcctgaccccagcccaggttgtggccatcgccagcaacataggtggcaagcaggccctcgaaaccgtccagagactgttaccggttctctgccaggaccacggcctgacccccgaccaggttgtcgctattgctagtaacggcggaggcaaacaggcgctggaaacagttcagcgcctcttgccggtcttgtgtcaggaccacggcctgaccccagaacaggttgtggccatcgccagcaacataggtggcaagcaggccctcgaaaccgtccagagactgttaccggttctctgccaggcccacggcctgaccccagaccaagttgtcgcgattgcaagcaacaacggaggcaaacaagccttagaaacagtccagagattgttgcctgtgctgtgccaagcccacggcctgacccccgcccaggttgtcgctattgctagtaacggcggaggcaaacaggcgctggaaacagttcagcgcctcttgccggtcttgtgtcaggaccacggcctgaccccggaccaggtggttgcaatcgcgtcacacgatgggggaaagcaggccctagaaaccgttcagcgactcctgcccgtcctgtgccaggaccacggcctgaccccagaacaagttgtcgcgattgcaagcaacaacggaggcaaacaagccttagaaacagtccagagattgttgccggtgctgtgccaagcccacggcctgaccccggaccaggtggttgcaatcgcgtcacacgatgggggaaagcaggccctagaaaccgttcagcgactcctgcccgtcctgtgccaggcccacggcctgaccccagcccaagttgtcgcgattgcaagcaacaacggaggcaaacaagccttagaaacagtccagagattgttgccggtgctgtgccaagaccacggcctgacccctgagcaggtagtggctattgcatccaacaacgggggcagacccgcactggagtcaatcgtggcccagctctcgaggccggaccccgcgctggccgcactcactaatgatcatcttgtagcgctggcctgcctcggcggacgacccgccttggatgcggtgaagaaggggctcccgcacgcgcctgcattgattaagcggaccaacagaaggatccccgagaggacatcacatcgagtggcagatcacgcgcaagtggtccgcgtgctcggattcttccagtgtcactcccaccccgcacaagcgttcgatgacgccatgactcaatttggtatgtcgagacacggactgctgcagctctttcgtagagtcggtgtcacagaactggaggcccgctcgggcacactgcctcccgcctcccagcggtgggacaggattctccaagcgagcggtatgaaacgcgcgaagccttcacctacgtcaactcagacacctgaccaggcgagccttcatgcgttcgcagactcgctggagagggatttggacgcgccctcgcccatgcatgaaggggaccaaactcgcgcgtcagccagcagcagggcagatcccaagaagaagcggaaagtaggaggaggaggaaccggaggaggaggctccgccgagtacgtgagggccctgttcgacttcaacggcaatgacgaggaggatctgccattcaagaagggcgacatcctgcggatcagagataagcccgaggagcagtggtggaacgccgaggactctgagggcaagcgcggcatgatcctggtgccttacgtggagaagtatagcggcgattacaaggaccacgatggcgactataaggatcacgacatcgattacaaggacgatgacgataagtctggcagctccgagacaggaccagtggcagtggaccctacactgcggagaaggatcgagcctcacgagtttgaggtgttctttgatccaagagagctgaggaaggagacatgcctgctgtacgagatcaagtggggcacatctcacaagatctggcgccactctagcaagaacaccacaaagcacgtggaagtgaatttcatcgagaagtttaccagcgagcggcacttctgccctagcacctcctgttctatcacatggtttctgagctggtccccatgcggcgagtgtagcaaggccatcaccgagttcctgtcccagcacccaaacgtgaccctggtcatctacgtggccaggctgtatcaccacatggaccagcagaacaggcagggcctgcgggatctggtgaattccggcgtgaccatccagatcatgacagcccccgagtacgattactgttggagaaacttcgtgaactacccacctggcaaggaggcacactggcctaggtacccacccctgtggatgaagctgtatgcactggagctgcacgcaggaatcctgggcctgcctccatgcctgaatatcctgcgccggaagcagccccagctgaccttctttacaatcgccctgcagagctgtcactaccagcggctgccacctcacatcctgtgggcaaccggcctgaagtccggaggatctggaggaagcggaggatccaccaacctgtctgacatcatcgagaaggagacaggcaagcagctggtcatccaggagagcatcctgatgctgcccgaggaggtggaggaagtgatcggcaacaagcctgagtccgatatcctggtgcacaccgcctacgacgagtccacagatgagaatgtgatgctgctgacctctgacgccccagagtataagccctgggccctggtcatccaggatagcaacggcgagaataagatcaagatgctgtccggcggaagcggaggatccggaggctctaccaatctgtccgatattattgaaaaagagacaggcaagcaactggtcatccaggagtctatcctgatgctgccagaagaagtcgaagaagtgatcggaaacaagcccgaaagcgacatcctggtccatactgcctacgacgagagtaccgacgaaaatgtgatgttactgacctccgacgcccctgagtataagccatgggctctggtcatccaggactccaatggagaaaataagatcaagatgttaagcggcggctccaagagaacagccgacggctccgagttcgagcccaagaagaagcggaaagtg

SEQ ID NO: 36 - protein, 1459 aa, Artificial Sequence
  WT-104-BE4-NC
MDYKDHDGDYKDHDIDYKDDDDKMAPKKKRKVGIHGVPAAVDLRTLGYSQQQQEKIKPKVRSTVAQHHEALVGHGFTHAHIVALSQHPAALGTVAVKYQDMIAALPEATHEAIVGVGKQWSGARALEALLTVAGELRGPPLQLDTGQLLKIAKRGGVTAVEAVHAWRNALTGAPLNLTPDQVVAIASNGGGKQALETVQRLLPVLCQDHGLTPEQVVAIASNNGGKQALETVQRLLPVLCQAHGLTPDQVVAIASHDGGKQALETVQRLLPVLCQAHGLTPAQVVAIASNNGGKQALETVQRLLPVLCQDHGLTPDQVVAIASHDGGKQALETVQRLLPVLCQDHGLTPEQVVAIASNNGGKQALETVQRLLPVLCQAHGLTPDQVVAIASNGGGKQALETVQRLLPVLCQAHGLTPAQVVAIASNIGGKQALETVQRLLPVLCQDHGLTPDQVVAIASNGGGKQALETVQRLLPVLCQDHGLTPEQVVAIASNIGGKQALETVQRLLPVLCQAHGLTPDQVVAIASNNGGKQALETVQRLLPVLCQAHGLTPAQVVAIASNGGGKQALETVQRLLPVLCQDHGLTPDQVVAIASHDGGKQALETVQRLLPVLCQDHGLTPEQVVAIASNNGGKQALETVQRLLPVLCQAHGLTPDQVVAIASHDGGKQALETVQRLLPVLCQAHGLTPAQVVAIASNNGGKQALETVQRLLPVLCQDHGLTPEQVVAIASNNGGRPALESIVAQLSRPDPALAALTNDHLVALACLGGRPALDAVKKGLPHAPALIKRTNRRIPERTSHRVADHAQVVRVLGFFQCHSHPAQAFDDAMTQFGMSRHGLLQLFRRVGVTELEARSGTLPPASQRWDRILQASGMKRAKPSPTSTQTPDQASLHAFADSLERDLDAPSPMHEGDQTRASASSRADPKKKRKVGGGGTGGGGSAEYVRALFDFNGNDEEDLPFKKGDILRIRDKPEEQWWNAEDSEGKRGMILVPYVEKYSGDYKDHDGDYKDHDIDYKDDDDKSGSSETGPVAVDPTLRRRIEPHEFEVFFDPRELRKETCLLYEIKWGTSHKIWRHSSKNTTKHVEVNFIEKFTSERHFCPSTSCSITWFLSWSPCGECSKAITEFLSQHPNVTLVIYVARLYHHMDQQNRQGLRDLVNSGVTIQIMTAPEYDYCWRNFVNYPPGKEAHWPRYPPLWMKLYALELHAGILGLPPCLNILRRKQPQLTFFTIALQSCHYQRLPPHILWATGLKSGGSGGSGGSTNLSDIIEKETGKQLVIQESILMLPEEVEEVIGNKPESDILVHTAYDESTDENVMLLTSDAPEYKPWALVIQDSNGENKIKMLSGGSGGSGGSTNLSDIIEKETGKQLVIQESILMLPEEVEEVIGNKPESDILVHTAYDESTDENVMLLTSDAPEYKPWALVIQDSNGENKIKMLSGGSKRTADGSEFEPKKKRKV

SEQ ID NO: 37 - DNA, 4023 bp, Artificial Sequence
  47-104-BE4
atggcttcctcccctccaaagaaaaagagaaaggttgcggccgctgactacaaggatgacgacgataaaagttggaaggacgcaagtggttggtctagaatgcatgcggccccgcgacggcgtgctgcgcaaccctccgacgcttcgccggccgcgcaggtggatctacgcacgctcggctacagtcagcagcagcaagagaagatcaaaccgaaggtgcgttcgacagtggcgcagcaccacgaggcactggtgggccatgggtttacacacgcgcacatcgttgcgctcagccaacacccggcagcgttagggaccgtcgctgtcacgtatcagcacataatcacggcgttgccagaggcgacacacgaagacatcgttggcgtcggcaaacagtggtccggcgcacgcgccctggaggccttgctcacggatgcgggggagttgagaggtccgccgttacagttggacacaggccaacttgtgaagattgcaaaacgtggcggcgtgaccgcaatggaggcagtgcatgcatcgcgcaatgcgctcacgggagcacccctcaacctgaccccagaccaggttgtggccatcgccagcaacataggtggcaagcaggccctcgaaaccgtccagagactgttaccggttctctgccaggaccacggcctgaccccggaacaggtggttgcaatcgcgtcacacgatgggggaaagcaggccctagaaaccgttcagcgactcctgcccgtcctgtgccaggcccacggcctgaccccagaccaggttgtggccatcgccagcaacataggtggcaagcaggccctcgaaaccgtccagagactgttaccggttctctgccaggcccacggcctgaccccagcccaagttgtcgcgattgcaagcaacaacggaggcaaacaagccttagaaacagtccagagattgttgccggtgctgtgccaagaccacggcctgaccccagaccaggttgtggccatcgccagcaacataggtggcaagcaggccctcgaaaccgtccagagactgttaccggttctctgccaggaccacggcctgaccccagaacaggttgtggccatcgccagcaacataggtggcaagcaggccctcgaaaccgtccagagactgttaccggttctctgccaggcccacggcctgaccccagaccaagttgtcgcgattgcaagcaacaacggaggcaaacaagccttagaaacagtccagagattgttgcctgtgctgtgccaagcccacggcctgaccccggcccaggtggttgcaatcgcgtcacacgatgggggaaagcaggccctagaaaccgttcagcgactcctgcccgtcctgtgccaggaccacggcctgaccccagaccaagttgtcgcgattgcaagcaacaacggaggcaaacaagccttagaaacagtccagagattgttgccggtgctgtgccaagaccacggcctgaccccagaacaagttgtcgcgattgcaagcaacaacggaggcaaacaagccttagaaacagtccagagattgttgccggtgctgtgccaagcccacggcctgaccccagaccaagttgtcgcgattgcaagcaacaacggaggcaaacaagccttagaaacagtccagagattgttgcctgtgctgtgccaagcccacggcctgaccccggcccaggtggttgcaatcgcgtcacacgatgggggaaagcaggccctagaaaccgttcagcgactcctgcccgtcctgtgccaggaccacggcctgaccccagaccaggttgtggccatcgccagcaacataggtggcaagcaggccctcgaaaccgtccagagactgttaccggttctctgccaggaccacggcctgaccccagaacaggttgtggccatcgccagcaacataggtggcaagcaggccctcgaaaccgtccagagactgttaccggttctctgccaggcccacggcctgaccccagaccaggttgtggccatcgccagcaacataggtggcaagcaggccctcgaaaccgtccagagactgttaccggttctctgccaggcccacggcctgaccccagcccaagttgtcgcgattgcaagcaacaacggaggcaaacaagccttagaaacagtccagagattgttgccggtgctgtgccaagaccacggcctgacccctgagcaggtagtggctattgcatccaacaacgggggcagacccgcactggagtcaatcgtggcccagctttcgaggccggaccccgcgctggccgcactcactaatgatcatcttgtagcgctggcctgcctcggcggacgtcctgccatggatgcagtgaaaaagggattgccgcacgcgccggaattgatcagatccagcagggcagatcccaagaagaagcggaaagtaggaggaggaggaaccggaggaggaggctccgccgagtacgtgagggccctgttcgacttcaacggcaatgacgaggaggatctgccattcaagaagggcgacatcctgcggatcagagataagcccgaggagcagtggtggaacgccgaggactctgagggcaagcgcggcatgatcctggtgccttacgtggagaagtatagcggcgattacaaggaccacgatggcgactataaggatcacgacatcgattacaaggacgatgacgataagtctggcagctccgagacaggaccagtggcagtggaccctacactgcggagaaggatcgagcctcacgagtttgaggtgttctttgatccaagagagctgaggaaggagacatgcctgctgtacgagatcaagtggggcacatctcacaagatctggcgccactctagcaagaacaccacaaagcacgtggaagtgaatttcatcgagaagtttaccagcgagcggcacttctgccctagcacctcctgttctatcacatggtttctgagctggtccccatgcggcgagtgtagcaaggccatcaccgagttcctgtcccagcacccaaacgtgaccctggtcatctacgtggccaggctgtatcaccacatggaccagcagaacaggcagggcctgcgggatctggtgaattccggcgtgaccatccagatcatgacagcccccgagtacgattactgttggagaaacttcgtgaactacccacctggcaaggaggcacactggcctaggtacccacccctgtggatgaagctgtatgcactggagctgcacgcaggaatcctgggcctgcctccatgcctgaatatcctgcgccggaagcagccccagctgaccttctttacaatcgccctgcagagctgtcactaccagcggctgccacctcacatcctgtgggcaaccggcctgaagtccggaggatctggaggaagcggaggatccaccaacctgtctgacatcatcgagaaggagacaggcaagcagctggtcatccaggagagcatcctgatgctgcccgaggaggtggaggaagtgatcggcaacaagcctgagtccgatatcctggtgcacaccgcctacgacgagtccacagatgagaatgtgatgctgctgacctctgacgccccagagtataagccctgggccctggtcatccaggatagcaacggcgagaataagatcaagatgctgtccggcggaagcggaggatccggaggctctaccaatctgtccgatattattgaaaaagagacaggcaagcaactggtcatccaggagtctatcctgatgctgccagaagaagtcgaagaagtgatcggaaacaagcccgaaagcgacatcctggtccatactgcctacgacgagagtaccgacgaaaatgtgatgttactgacctccgacgcccctgagtataagccatgggctctggtcatccaggactccaatggagaaaataagatcaagatgttaagcggcggctccaagagaacagccgacggctccgagttcgagcccaagaagaagcggaaagtg

SEQ ID NO: 38 - protein, 1341 aa, Artificial Sequence
  47-104-BE4
MASSPPKKKRKVAAADYKDDDDKSWKDASGWSRMHAAPRRRAAQPSDASPAAQVDLRTLGYSQQQQEKIKPKVRSTVAQHHEALVGHGFTHAHIVALSQHPAALGTVAVTYQHIITALPEATHEDIVGVGKQWSGARALEALLTDAGELRGPPLQLDTGQLVKIAKRGGVTAMEAVHASRNALTGAPLNLTPDQVVAIASNIGGKQALETVQRLLPVLCQDHGLTPEQVVAIASHDGGKQALETVQRLLPVLCQAHGLTPDQVVAIASNIGGKQALETVQRLLPVLCQAHGLTPAQVVAIASNNGGKQALETVQRLLPVLCQDHGLTPDQVVAIASNIGGKQALETVQRLLPVLCQDHGLTPEQVVAIASNIGGKQALETVQRLLPVLCQAHGLTPDQVVAIASNNGGKQALETVQRLLPVLCQAHGLTPAQVVAIASHDGGKQALETVQRLLPVLCQDHGLTPDQVVAIASNNGGKQALETVQRLLPVLCQDHGLTPEQVVAIASNNGGKQALETVQRLLPVLCQAHGLTPDQVVAIASNNGGKQALETVQRLLPVLCQAHGLTPAQVVAIASHDGGKQALETVQRLLPVLCQDHGLTPDQVVAIASNIGGKQALETVQRLLPVLCQDHGLTPEQVVAIASNIGGKQALETVQRLLPVLCQAHGLTPDQVVAIASNIGGKQALETVQRLLPVLCQAHGLTPAQVVAIASNNGGKQALETVQRLLPVLCQDHGLTPEQVVAIASNNGGRPALESIVAQLSRPDPALAALTNDHLVALACLGGRPAMDAVKKGLPHAPELIRSSRADPKKKRKVGGGGTGGGGSAEYVRALFDFNGNDEEDLPFKKGDILRIRDKPEEQWWNAEDSEGKRGMILVPYVEKYSGDYKDHDGDYKDHDIDYKDDDDKSGSSETGPVAVDPTLRRRIEPHEFEVFFDPRELRKETCLLYEIKWGTSHKIWRHSSKNTTKHVEVNFIEKFTSERHFCPSTSCSITWFLSWSPCGECSKAITEFLSQHPNVTLVIYVARLYHHMDQQNRQGLRDLVNSGVTIQIMTAPEYDYCWRNFVNYPPGKEAHWPRYPPLWMKLYALELHAGILGLPPCLNILRRKQPQLTFFTIALQSCHYQRLPPHILWATGLKSGGSGGSGGSTNLSDIIEKETGKQLVIQESILMLPEEVEEVIGNKPESDILVHTAYDESTDENVMLLTSDAPEYKPWALVIQDSNGENKIKMLSGGSGGSGGSTNLSDIIEKETGKQLVIQESILMLPEEVEEVIGNKPESDILVHTAYDESTDENVMLLTSDAPEYKPWALVIQDSNGENKIKMLSGGSKRTADGSEFEPKKKRKV

SEQ ID NO: 39 - DNA, 4023 bp, Artificial Sequence
  47-104-BE4-NC
atggcttcctcccctccaaagaaaaagagaaaggttgcggccgctgactacaaggatgacgacgataaaagttggaaggacgcaagtggttggtctagaatgcatgcggccccgcgacggcgtgctgcgcaaccctccgacgcttcgccggccgcgcaggtggatctacgcacgctcggctacagtcagcagcagcaagagaagatcaaaccgaaggtgcgttcgacagtggcgcagcaccacgaggcactggtgggccatgggtttacacacgcgcacatcgttgcgctcagccaacacccggcagcgttagggaccgtcgctgtcacgtatcagcacataatcacggcgttgccagaggcgacacacgaagacatcgttggcgtcggcaaacagtggtccggcgcacgcgccctggaggccttgctcacggatgcgggggagttgagaggtccgccgttacagttggacacaggccaacttgtgaagattgcaaaacgtggcggcgtgaccgcaatggaggcagtgcatgcatcgcgcaatgcgctcacgggagcacccctcaacctgacccccgaccaggttgtcgctattgctagtaacggcggaggcaaacaggcgctggaaacagttcagcgcctcttgccggtcttgtgtcaggaccacggcctgaccccagaacaagttgtcgcgattgcaagcaacaacggaggcaaacaagccttagaaacagtccagagattgttgccggtgctgtgccaagcccacggcctgaccccggaccaggtggttgcaatcgcgtcacacgatgggggaaagcaggccctagaaaccgttcagcgactcctgcccgtcctgtgccaggcccacggcctgaccccagcccaagttgtcgcgattgcaagcaacaacggaggcaaacaagccttagaaacagtccagagattgttgccggtgctgtgccaagaccacggcctgaccccggaccaggtggttgcaatcgcgtcacacgatgggggaaagcaggccctagaaaccgttcagcgactcctgcccgtcctgtgccaggaccacggcctgaccccagaacaagttgtcgcgattgcaagcaacaacggaggcaaacaagccttagaaacagtccagagattgttgccggtgctgtgccaagcccacggcctgacccccgaccaggttgtcgctattgctagtaacggcggaggcaaacaggcgctggaaacagttcagcgcctcttgccggtcttgtgtcaggcccacggcctgaccccagcccaggttgtggccatcgccagcaacataggtggcaagcaggccctcgaaaccgtccagagactgttaccggttctctgccaggaccacggcctgacccccgaccaggttgtcgctattgctagtaacggcggaggcaaacaggcgctggaaacagttcagcgcctcttgccggtcttgtgtcaggaccacggcctgaccccagaacaggttgtggccatcgccagcaacataggtggcaagcaggccctcgaaaccgtccagagactgttaccggttctctgccaggcccacggcctgaccccagaccaagttgtcgcgattgcaagcaacaacggaggcaaacaagccttagaaacagtccagagattgttgcctgtgctgtgccaagcccacggcctgacccccgcccaggttgtcgctattgctagtaacggcggaggcaaacaggcgctggaaacagttcagcgcctcttgccggtcttgtgtcaggaccacggcctgaccccggaccaggtggttgcaatcgcgtcacacgatgggggaaagcaggccctagaaaccgttcagcgactcctgcccgtcctgtgccaggaccacggcctgaccccagaacaagttgtcgcgattgcaagcaacaacggaggcaaacaagccttagaaacagtccagagattgttgccggtgctgtgccaagcccacggcctgaccccggaccaggtggttgcaatcgcgtcacacgatgggggaaagcaggccctagaaaccgttcagcgactcctgcccgtcctgtgccaggcccacggcctgaccccagcccaagttgtcgcgattgcaagcaacaacggaggcaaacaagccttagaaacagtccagagattgttgccggtgctgtgccaagaccacggcctgacccctgagcaggtagtggctattgcatccaacaacgggggcagacccgcactggagtcaatcgtggcccagctttcgaggccggaccccgcgctggccgcactcactaatgatcatcttgtagcgctggcctgcctcggcggacgtcctgccatggatgcagtgaaaaagggattgccgcacgcgccggaattgatcagatccagcagggcagatcccaagaagaagcggaaagtaggaggaggaggaaccggaggaggaggctccgccgagtacgtgagggccctgttcgacttcaacggcaatgacgaggaggatctgccattcaagaagggcgacatcctgcggatcagagataagcccgaggagcagtggtggaacgccgaggactctgagggcaagcgcggcatgatcctggtgccttacgtggagaagtatagcggcgattacaaggaccacgatggcgactataaggatcacgacatcgattacaaggacgatgacgataagtctggcagctccgagacaggaccagtggcagtggaccctacactgcggagaaggatcgagcctcacgagtttgaggtgttctttgatccaagagagctgaggaaggagacatgcctgctgtacgagatcaagtggggcacatctcacaagatctggcgccactctagcaagaacaccacaaagcacgtggaagtgaatttcatcgagaagtttaccagcgagcggcacttctgccctagcacctcctgttctatcacatggtttctgagctggtccccatgcggcgagtgtagcaaggccatcaccgagttcctgtcccagcacccaaacgtgaccctggtcatctacgtggccaggctgtatcaccacatggaccagcagaacaggcagggcctgcgggatctggtgaattccggcgtgaccatccagatcatgacagcccccgagtacgattactgttggagaaacttcgtgaactacccacctggcaaggaggcacactggcctaggtacccacccctgtggatgaagctgtatgcactggagctgcacgcaggaatcctgggcctgcctccatgcctgaatatcctgcgccggaagcagccccagctgaccttctttacaatcgccctgcagagctgtcactaccagcggctgccacctcacatcctgtgggcaaccggcctgaagtccggaggatctggaggaagcggaggatccaccaacctgtctgacatcatcgagaaggagacaggcaagcagctggtcatccaggagagcatcctgatgctgcccgaggaggtggaggaagtgatcggcaacaagcctgagtccgatatcctggtgcacaccgcctacgacgagtccacagatgagaatgtgatgctgctgacctctgacgccccagagtataagccctgggccctggtcatccaggatagcaacggcgagaataagatcaagatgctgtccggcggaagcggaggatccggaggctctaccaatctgtccgatattattgaaaaagagacaggcaagcaactggtcatccaggagtctatcctgatgctgccagaagaagtcgaagaagtgatcggaaacaagcccgaaagcgacatcctggtccatactgcctacgacgagagtaccgacgaaaatgtgatgttactgacctccgacgcccctgagtataagccatgggctctggtcatccaggactccaatggagaaaataagatcaagatgttaagcggcggctccaagagaacagccgacggctccgagttcgagcccaagaagaagcggaaagtg

SEQ ID NO: 40 - protein, 1341 aa, Artificial Sequence
  47-104-BE4-NC
MASSPPKKKRKVAAADYKDDDDKSWKDASGWSRMHAAPRRRAAQPSDASPAAQVDLRTLGYSQQQQEKIKPKVRSTVAQHHEALVGHGFTHAHIVALSQHPAALGTVAVTYQHIITALPEATHEDIVGVGKQWSGARALEALLTDAGELRGPPLQLDTGQLVKIAKRGGVTAMEAVHASRNALTGAPLNLTPDQVVAIASNGGGKQALETVQRLLPVLCQDHGLTPEQVVAIASNNGGKQALETVQRLLPVLCQAHGLTPDQVVAIASHDGGKQALETVQRLLPVLCQAHGLTPAQVVAIASNNGGKQALETVQRLLPVLCQDHGLTPDQVVAIASHDGGKQALETVQRLLPVLCQDHGLTPEQVVAIASNNGGKQALETVQRLLPVLCQAHGLTPDQVVAIASNGGGKQALETVQRLLPVLCQAHGLTPAQVVAIASNIGGKQALETVQRLLPVLCQDHGLTPDQVVAIASNGGGKQALETVQRLLPVLCQDHGLTPEQVVAIASNIGGKQALETVQRLLPVLCQAHGLTPDQVVAIASNNGGKQALETVQRLLPVLCQAHGLTPAQVVAIASNGGGKQALETVQRLLPVLCQDHGLTPDQVVAIASHDGGKQALETVQRLLPVLCQDHGLTPEQVVAIASNNGGKQALETVQRLLPVLCQAHGLTPDQVVAIASHDGGKQALETVQRLLPVLCQAHGLTPAQVVAIASNNGGKQALETVQRLLPVLCQDHGLTPEQVVAIASNNGGRPALESIVAQLSRPDPALAALTNDHLVALACLGGRPAMDAVKKGLPHAPELIRSSRADPKKKRKVGGGGTGGGGSAEYVRALFDFNGNDEEDLPFKKGDILRIRDKPEEQWWNAEDSEGKRGMILVPYVEKYSGDYKDHDGDYKDHDIDYKDDDDKSGSSETGPVAVDPTLRRRIEPHEFEVFFDPRELRKETCLLYEIKWGTSHKIWRHSSKNTTKHVEVNFIEKFTSERHFCPSTSCSITWFLSWSPCGECSKAITEFLSQHPNVTLVIYVARLYHHMDQQNRQGLRDLVNSGVTIQIMTAPEYDYCWRNFVNYPPGKEAHWPRYPPLWMKLYALELHAGILGLPPCLNILRRKQPQLTFFTIALQSCHYQRLPPHILWATGLKSGGSGGSGGSTNLSDIIEKETGKQLVIQESILMLPEEVEEVIGNKPESDILVHTAYDESTDENVMLLTSDAPEYKPWALVIQDSNGENKIKMLSGGSGGSGGSTNLSDIIEKETGKQLVIQESILMLPEEVEEVIGNKPESDILVHTAYDESTDENVMLLTSDAPEYKPWALVIQDSNGENKIKMLSGGSKRTADGSEFEPKKKRKV

SEQ ID NO: 41 - DNA, 4320 bp, Artificial Sequence
  WT-104-AID
atggactataaggaccacgacggagactacaaggatcatgatattgattacaaagacgatgacgataagatggccccaaagaagaagcggaaggtcggtatccacggagtcccagcagccgtagatttgagaactttgggatattcacagcagcagcaggaaaagatcaagcccaaagtgaggtcgacagtcgcgcagcatcacgaagcgctggtgggtcatgggtttacacatgcccacatcgtagccttgtcgcagcaccctgcagcccttggcacggtcgccgtcaagtaccaggacatgattgcggcgttgccggaagccacacatgaggcgatcgtcggtgtggggaaacagtggagcggagcccgagcgcttgaggccctgttgacggtcgcgggagagctgagagggcctccccttcagctggacacgggccagttgctgaagatcgcgaagcggggaggagtcacggcggtcgaggcggtacacgcgtggcgcaatgcgctcacgggagcacccctcaacctgaccccagaccaggttgtggccatcgccagcaacataggtggcaagcaggccctcgaaaccgtccagagactgttaccggttctctgccaggaccacggcctgaccccggaacaggtggttgcaatcgcgtcacacgatgggggaaagcaggccctagaaaccgttcagcgactcctgcccgtcctgtgccaggcccacggcctgaccccagaccaggttgtggccatcgccagcaacataggtggcaagcaggccctcgaaaccgtccagagactgttaccggttctctgccaggcccacggcctgaccccagcccaagttgtcgcgattgcaagcaacaacggaggcaaacaagccttagaaacagtccagagattgttgccggtgctgtgccaagaccacggcctgaccccagaccaggttgtggccatcgccagcaacataggtggcaagcaggccctcgaaaccgtccagagactgttaccggttctctgccaggaccacggcctgaccccagaacaggttgtggccatcgccagcaacataggtggcaagcaggccctcgaaaccgtccagagactgttaccggttctctgccaggcccacggcctgaccccagaccaagttgtcgcgattgcaagcaacaacggaggcaaacaagccttagaaacagtccagagattgttgcctgtgctgtgccaagcccacggcctgaccccggcccaggtggttgcaatcgcgtcacacgatgggggaaagcaggccctagaaaccgttcagcgactcctgcccgtcctgtgccaggaccacggcctgaccccagaccaagttgtcgcgattgcaagcaacaacggaggcaaacaagccttagaaacagtccagagattgttgccggtgctgtgccaagaccacggcctgaccccagaacaagttgtcgcgattgcaagcaacaacggaggcaaacaagccttagaaacagtccagagattgttgccggtgctgtgccaagcccacggcctgaccccagaccaagttgtcgcgattgcaagcaacaacggaggcaaacaagccttagaaacagtccagagattgttgcctgtgctgtgccaagcccacggcctgaccccggcccaggtggttgcaatcgcgtcacacgatgggggaaagcaggccctagaaaccgttcagcgactcctgcccgtcctgtgccaggaccacggcctgaccccagaccaggttgtggccatcgccagcaacataggtggcaagcaggccctcgaaaccgtccagagactgttaccggttctctgccaggaccacggcctgaccccagaacaggttgtggccatcgccagcaacataggtggcaagcaggccctcgaaaccgtccagagactgttaccggttctctgccaggcccacggcctgaccccagaccaggttgtggccatcgccagcaacataggtggcaagcaggccctcgaaaccgtccagagactgttaccggttctctgccaggcccacggcctgaccccagcccaagttgtcgcgattgcaagcaacaacggaggcaaacaagccttagaaacagtccagagattgttgccggtgctgtgccaagaccacggcctgacccctgagcaggtagtggctattgcatccaacaacgggggcagacccgcactggagtcaatcgtggcccagctctcgaggccggaccccgcgctggccgcactcactaatgatcatcttgtagcgctggcctgcctcggcggacgacccgccttggatgcggtgaagaaggggctcccgcacgcgcctgcattgattaagcggaccaacagaaggatccccgagaggacatcacatcgagtggcagatcacgcgcaagtggtccgcgtgctcggattcttccagtgtcactcccaccccgcacaagcgttcgatgacgccatgactcaatttggtatgtcgagacacggactgctgcagctctttcgtagagtcggtgtcacagaactggaggcccgctcgggcacactgcctcccgcctcccagcggtgggacaggattctccaagcgagcggtatgaaacgcgcgaagccttcacctacgtcaactcagacacctgaccaggcgagccttcatgcgttcgcagactcgctggagagggatttggacgcgccctcgcccatgcatgaaggggaccaaactcgcgcgtcagccagcagcagggcagatcccaagaagaagcggaaagtaggaggaggaggaaccggaggaggaggctccgccgagtacgtgagggccctgttcgacttcaacggcaatgacgaggaggatctgccattcaagaagggcgacatcctgcggatcagagataagcccgaggagcagtggtggaacgccgaggactctgagggcaagcgcggcatgatcctggtgccttacgtggagaagtatagcggcgattacaaggaccacgatggcgactataaggatcacgacatcgattacaaggacgatgacgataagtctggcatgaccgacgccgagtatgtgcggatccacgagaagctggatatctacaccttcaagaagcagttctttaacaataagaagtccgtgtctcacagatgctatgtgctgttcgagctgaagcggagaggagagaggcgcgcatgtttttggggctacgccgtgaataagccacagagcggaaccgagaggggaatccacgccgagatcttctccatcaggaaagtggaggagtatctgcgcgacaaccctggccagtttacaatcaattggtacagctcctggagcccatgcgccgattgtgccgagaagatcctggagtggtataaccaggagctgagaggcaatggccacaccctgaagatctgggcctgcaagctgtactatgagaagaacgcccggaatcagatcggcctgtggaacctgagagacaatggcgtgggcctgaacgtgatggtgtctgagcactaccagtgctgtaggaagatcttcatccagtctagccacaatcagctgaacgagaatcgctggctggagaagacactgaagagggccgagaagtggcgcagcgagctgtccatcatgatccaggtgaagatcctgcacaccacaaagagcccagcagtgggatccggaggatctggaggaagcggaggatccaccaacctgtctgacatcatcgagaaggagacaggcaagcagctggtcatccaggagagcatcctgatgctgcccgaggaggtggaggaagtgatcggcaacaagcctgagtccgatatcctggtgcacaccgcctacgacgagtccacagatgagaatgtgatgctgctgacctctgacgccccagagtataagccctgggccctggtcatccaggatagcaacggcgagaataagatcaagatgctgtccggcggaagcggaggatccggaggctctaccaatctgtccgatattattgaaaaagagacaggcaagcaactggtcatccaggagtctatcctgatgctgccagaagaagtcgaagaagtgatcggaaacaagcccgaaagcgacatcctggtccatactgcctacgacgagagtaccgacgaaaatgtgatgttactgacctccgacgcccctgagtataagccatgggctctggtcatccaggactccaatggagaaaataagatcaagatgttaagcggcggctccaagagaacagccgacggctccgagttcgagcccaagaagaagcggaaagtg

SEQ ID NO: 42 - protein, 1440 aa, Artificial Sequence
  WT-104-AID
MDYKDHDGDYKDHDIDYKDDDDKMAPKKKRKVGIHGVPAAVDLRTLGYSQQQQEKIKPKVRSTVAQHHEALVGHGFTHAHIVALSQHPAALGTVAVKYQDMIAALPEATHEAIVGVGKQWSGARALEALLTVAGELRGPPLQLDTGQLLKIAKRGGVTAVEAVHAWRNALTGAPLNLTPDQVVAIASNIGGKQALETVQRLLPVLCQDHGLTPEQVVAIASHDGGKQALETVQRLLPVLCQAHGLTPDQVVAIASNIGGKQALETVQRLLPVLCQAHGLTPAQVVAIASNNGGKQALETVQRLLPVLCQDHGLTPDQVVAIASNIGGKQALETVQRLLPVLCQDHGLTPEQVVAIASNIGGKQALETVQRLLPVLCQAHGLTPDQVVAIASNNGGKQALETVQRLLPVLCQAHGLTPAQVVAIASHDGGKQALETVQRLLPVLCQDHGLTPDQVVAIASNNGGKQALETVQRLLPVLCQDHGLTPEQVVAIASNNGGKQALETVQRLLPVLCQAHGLTPDQVVAIASNNGGKQALETVQRLLPVLCQAHGLTPAQVVAIASHDGGKQALETVQRLLPVLCQDHGLTPDQVVAIASNIGGKQALETVQRLLPVLCQDHGLTPEQVVAIASNIGGKQALETVQRLLPVLCQAHGLTPDQVVAIASNIGGKQALETVQRLLPVLCQAHGLTPAQVVAIASNNGGKQALETVQRLLPVLCQDHGLTPEQVVAIASNNGGRPALESIVAQLSRPDPALAALTNDHLVALACLGGRPALDAVKKGLPHAPALIKRTNRRIPERTSHRVADHAQVVRVLGFFQCHSHPAQAFDDAMTQFGMSRHGLLQLFRRVGVTELEARSGTLPPASQRWDRILQASGMKRAKPSPTSTQTPDQASLHAFADSLERDLDAPSPMHEGDQTRASASSRADPKKKRKVGGGGTGGGGSAEYVRALFDFNGNDEEDLPFKKGDILRIRDKPEEQWWNAEDSEGKRGMILVPYVEKYSGDYKDHDGDYKDHDIDYKDDDDKSGMTDAEYVRIHEKLDIYTFKKQFFNNKKSVSHRCYVLFELKRRGERRACFWGYAVNKPQSGTERGIHAEIFSIRKVEEYLRDNPGQFTINWYSSWSPCADCAEKILEWYNQELRGNGHTLKIWACKLYYEKNARNQIGLWNLRDNGVGLNVMVSEHYQCCRKIFIQSSHNQLNENRWLEKTLKRAEKWRSELSIMIQVKILHTTKSPAVGSGGSGGSGGSTNLSDIIEKETGKQLVIQESILMLPEEVEEVIGNKPESDILVHTAYDESTDENVMLLTSDAPEYKPWALVIQDSNGENKIKMLSGGSGGSGGSTNLSDIIEKETGKQLVIQESILMLPEEVEEVIGNKPESDILVHTAYDESTDENVMLLTSDAPEYKPWALVIQDSNGENKIKMLSGGSKRTADGSEFEPKKKRKV

SEQ ID NO: 43 - DNA, 4320 bp, Artificial Sequence
  WT-104-AID-NC
atggactataaggaccacgacggagactacaaggatcatgatattgattacaaagacgatgacgataagatggccccaaagaagaagcggaaggtcggtatccacggagtcccagcagccgtagatttgagaactttgggatattcacagcagcagcaggaaaagatcaagcccaaagtgaggtcgacagtcgcgcagcatcacgaagcgctggtgggtcatgggtttacacatgcccacatcgtagccttgtcgcagcaccctgcagcccttggcacggtcgccgtcaagtaccaggacatgattgcggcgttgccggaagccacacatgaggcgatcgtcggtgtggggaaacagtggagcggagcccgagcgcttgaggccctgttgacggtcgcgggagagctgagagggcctccccttcagctggacacgggccagttgctgaagatcgcgaagcggggaggagtcacggcggtcgaggcggtacacgcgtggcgcaatgcgctcacgggagcacccctcaacctgacccccgaccaggttgtcgctattgctagtaacggcggaggcaaacaggcgctggaaacagttcagcgcctcttgccggtcttgtgtcaggaccacggcctgaccccagaacaagttgtcgcgattgcaagcaacaacggaggcaaacaagccttagaaacagtccagagattgttgccggtgctgtgccaagcccacggcctgaccccggaccaggtggttgcaatcgcgtcacacgatgggggaaagcaggccctagaaaccgttcagcgactcctgcccgtcctgtgccaggcccacggcctgaccccagcccaagttgtcgcgattgcaagcaacaacggaggcaaacaagccttagaaacagtccagagattgttgccggtgctgtgccaagaccacggcctgaccccggaccaggtggttgcaatcgcgtcacacgatgggggaaagcaggccctagaaaccgttcagcgactcctgcccgtcctgtgccaggaccacggcctgaccccagaacaagttgtcgcgattgcaagcaacaacggaggcaaacaagccttagaaacagtccagagattgttgccggtgctgtgccaagcccacggcctgacccccgaccaggttgtcgctattgctagtaacggcggaggcaaacaggcgctggaaacagttcagcgcctcttgccggtcttgtgtcaggcccacggcctgaccccagcccaggttgtggccatcgccagcaacataggtggcaagcaggccctcgaaaccgtccagagactgttaccggttctctgccaggaccacggcctgacccccgaccaggttgtcgctattgctagtaacggcggaggcaaacaggcgctggaaacagttcagcgcctcttgccggtcttgtgtcaggaccacggcctgaccccagaacaggttgtggccatcgccagcaacataggtggcaagcaggccctcgaaaccgtccagagactgttaccggttctctgccaggcccacggcctgaccccagaccaagttgtcgcgattgcaagcaacaacggaggcaaacaagccttagaaacagtccagagattgttgcctgtgctgtgccaagcccacggcctgacccccgcccaggttgtcgctattgctagtaacggcggaggcaaacaggcgctggaaacagttcagcgcctcttgccggtcttgtgtcaggaccacggcctgaccccggaccaggtggttgcaatcgcgtcacacgatgggggaaagcaggccctagaaaccgttcagcgactcctgcccgtcctgtgccaggaccacggcctgaccccagaacaagttgtcgcgattgcaagcaacaacggaggcaaacaagccttagaaacagtccagagattgttgccggtgctgtgccaagcccacggcctgaccccggaccaggtggttgcaatcgcgtcacacgatgggggaaagcaggccctagaaaccgttcagcgactcctgcccgtcctgtgccaggcccacggcctgaccccagcccaagttgtcgcgattgcaagcaacaacggaggcaaacaagccttagaaacagtccagagattgttgccggtgctgtgccaagaccacggcctgacccctgagcaggtagtggctattgcatccaacaacgggggcagacccgcactggagtcaatcgtggcccagctctcgaggccggaccccgcgctggccgcactcactaatgatcatcttgtagcgctggcctgcctcggcggacgacccgccttggatgcggtgaagaaggggctcccgcacgcgcctgcattgattaagcggaccaacagaaggatccccgagaggacatcacatcgagtggcagatcacgcgcaagtggtccgcgtgctcggattcttccagtgtcactcccaccccgcacaagcgttcgatgacgccatgactcaatttggtatgtcgagacacggactgctgcagctctttcgtagagtcggtgtcacagaactggaggcccgctcgggcacactgcctcccgcctcccagcggtgggacaggattctccaagcgagcggtatgaaacgcgcgaagccttcacctacgtcaactcagacacctgaccaggcgagccttcatgcgttcgcagactcgctggagagggatttggacgcgccctcgcccatgcatgaaggggaccaaactcgcgcgtcagccagcagcagggcagatcccaagaagaagcggaaagtaggaggaggaggaaccggaggaggaggctccgccgagtacgtgagggccctgttcgacttcaacggcaatgacgaggaggatctgccattcaagaagggcgacatcctgcggatcagagataagcccgaggagcagtggtggaacgccgaggactctgagggcaagcgcggcatgatcctggtgccttacgtggagaagtatagcggcgattacaaggaccacgatggcgactataaggatcacgacatcgattacaaggacgatgacgataagtctggcatgaccgacgccgagtatgtgcggatccacgagaagctggatatctacaccttcaagaagcagttctttaacaataagaagtccgtgtctcacagatgctatgtgctgttcgagctgaagcggagaggagagaggcgcgcatgtttttggggctacgccgtgaataagccacagagcggaaccgagaggggaatccacgccgagatcttctccatcaggaaagtggaggagtatctgcgcgacaaccctggccagtttacaatcaattggtacagctcctggagcccatgcgccgattgtgccgagaagatcctggagtggtataaccaggagctgagaggcaatggccacaccctgaagatctgggcctgcaagctgtactatgagaagaacgcccggaatcagatcggcctgtggaacctgagagacaatggcgtgggcctgaacgtgatggtgtctgagcactaccagtgctgtaggaagatcttcatccagtctagccacaatcagctgaacgagaatcgctggctggagaagacactgaagagggccgagaagtggcgcagcgagctgtccatcatgatccaggtgaagatcctgcacaccacaaagagcccagcagtgggatccggaggatctggaggaagcggaggatccaccaacctgtctgacatcatcgagaaggagacaggcaagcagctggtcatccaggagagcatcctgatgctgcccgaggaggtggaggaagtgatcggcaacaagcctgagtccgatatcctggtgcacaccgcctacgacgagtccacagatgagaatgtgatgctgctgacctctgacgccccagagtataagccctgggccctggtcatccaggatagcaacggcgagaataagatcaagatgctgtccggcggaagcggaggatccggaggctctaccaatctgtccgatattattgaaaaagagacaggcaagcaactggtcatccaggagtctatcctgatgctgccagaagaagtcgaagaagtgatcggaaacaagcccgaaagcgacatcctggtccatactgcctacgacgagagtaccgacgaaaatgtgatgttactgacctccgacgcccctgagtataagccatgggctctggtcatccaggactccaatggagaaaataagatcaagatgttaagcggcggctccaagagaacagccgacggctccgagttcgagcccaagaagaagcggaaagtg

SEQ ID NO: 44 - protein, 1440 aa, Artificial Sequence
  WT-104-AID-NC
MDYKDHDGDYKDHDIDYKDDDDKMAPKKKRKVGIHGVPAAVDLRTLGYSQQQQEKIKPKVRSTVAQHHEALVGHGFTHAHIVALSQHPAALGTVAVKYQDMIAALPEATHEAIVGVGKQWSGARALEALLTVAGELRGPPLQLDTGQLLKIAKRGGVTAVEAVHAWRNALTGAPLNLTPDQVVAIASNGGGKQALETVQRLLPVLCQDHGLTPEQVVAIASNNGGKQALETVQRLLPVLCQAHGLTPDQVVAIASHDGGKQALETVQRLLPVLCQAHGLTPAQVVAIASNNGGKQALETVQRLLPVLCQDHGLTPDQVVAIASHDGGKQALETVQRLLPVLCQDHGLTPEQVVAIASNNGGKQALETVQRLLPVLCQAHGLTPDQVVAIASNGGGKQALETVQRLLPVLCQAHGLTPAQVVAIASNIGGKQALETVQRLLPVLCQDHGLTPDQVVAIASNGGGKQALETVQRLLPVLCQDHGLTPEQVVAIASNIGGKQALETVQRLLPVLCQAHGLTPDQVVAIASNNGGKQALETVQRLLPVLCQAHGLTPAQVVAIASNGGGKQALETVQRLLPVLCQDHGLTPDQVVAIASHDGGKQALETVQRLLPVLCQDHGLTPEQVVAIASNNGGKQALETVQRLLPVLCQAHGLTPDQVVAIASHDGGKQALETVQRLLPVLCQAHGLTPAQVVAIASNNGGKQALETVQRLLPVLCQDHGLTPEQVVAIASNNGGRPALESIVAQLSRPDPALAALTNDHLVALACLGGRPALDAVKKGLPHAPALIKRTNRRIPERTSHRVADHAQVVRVLGFFQCHSHPAQAFDDAMTQFGMSRHGLLQLFRRVGVTELEARSGTLPPASQRWDRILQASGMKRAKPSPTSTQTPDQASLHAFADSLERDLDAPSPMHEGDQTRASASSRADPKKKRKVGGGGTGGGGSAEYVRALFDFNGNDEEDLPFKKGDILRIRDKPEEQWWNAEDSEGKRGMILVPYVEKYSGDYKDHDGDYKDHDIDYKDDDDKSGMTDAEYVRIHEKLDIYTFKKQFFNNKKSVSHRCYVLFELKRRGERRACFWGYAVNKPQSGTERGIHAEIFSIRKVEEYLRDNPGQFTINWYSSWSPCADCAEKILEWYNQELRGNGHTLKIWACKLYYEKNARNQIGLWNLRDNGVGLNVMVSEHYQCCRKIFIQSSHNQLNENRWLEKTLKRAEKWRSELSIMIQVKILHTTKSPAVGSGGSGGSGGSTNLSDIIEKETGKQLVIQESILMLPEEVEEVIGNKPESDILVHTAYDESTDENVMLLTSDAPEYKPWALVIQDSNGENKIKMLSGGSGGSGGSTNLSDIIEKETGKQLVIQESILMLPEEVEEVIGNKPESDILVHTAYDESTDENVMLLTSDAPEYKPWALVIQDSNGENKIKMLSGGSKRTADGSEFEPKKKRKV

SEQ ID NO: 45 - DNA, 3975 bp, Artificial Sequence
  63-104-AID
atggactataaggaccacgacggagactacaaggatcatgatattgattacaaagacgatgacgataagatggccccaaagaagaagcggaaggtcggtatccacggagtcccagcagccgtagatttgagaactttgggatattcacagcagcagcaggaaaagatcaagcccaaagtgaggtcgacagtcgcgcagcatcacgaagcgctggtgggtcatgggtttacacatgcccacatcgtagccttgtcgcagcaccctgcagcccttggcacggtcgccgtcaagtaccaggacatgattgcggcgttgccggaagccacacatgaggcgatcgtcggtgtggggaaacagtggagcggagcccgagcgcttgaggccctgttgacggtcgcgggagagctgagagggcctccccttcagctggacacgggccagttgctgaagatcgcgaagcggggaggagtcacggcggtcgaggcggtacacgcgtggcgcaatgcgctcacgggagcacccctcaacctgaccccagaccaggttgtggccatcgccagcaacataggtggcaagcaggccctcgaaaccgtccagagactgttaccggttctctgccaggaccacggcctgaccccggaacaggtggttgcaatcgcgtcacacgatgggggaaagcaggccctagaaaccgttcagcgactcctgcccgtcctgtgccaggcccacggcctgaccccagaccaggttgtggccatcgccagcaacataggtggcaagcaggccctcgaaaccgtccagagactgttaccggttctctgccaggcccacggcctgaccccagcccaagttgtcgcgattgcaagcaacaacggaggcaaacaagccttagaaacagtccagagattgttgccggtgctgtgccaagaccacggcctgaccccagaccaggttgtggccatcgccagcaacataggtggcaagcaggccctcgaaaccgtccagagactgttaccggttctctgccaggaccacggcctgaccccagaacaggttgtggccatcgccagcaacataggtggcaagcaggccctcgaaaccgtccagagactgttaccggttctctgccaggcccacggcctgaccccagaccaagttgtcgcgattgcaagcaacaacggaggcaaacaagccttagaaacagtccagagattgttgcctgtgctgtgccaagcccacggcctgaccccggcccaggtggttgcaatcgcgtcacacgatgggggaaagcaggccctagaaaccgttcagcgactcctgcccgtcctgtgccaggaccacggcctgaccccagaccaagttgtcgcgattgcaagcaacaacggaggcaaacaagccttagaaacagtccagagattgttgccggtgctgtgccaagaccacggcctgaccccagaacaagttgtcgcgattgcaagcaacaacggaggcaaacaagccttagaaacagtccagagattgttgccggtgctgtgccaagcccacggcctgaccccagaccaagttgtcgcgattgcaagcaacaacggaggcaaacaagccttagaaacagtccagagattgttgcctgtgctgtgccaagcccacggcctgaccccggcccaggtggttgcaatcgcgtcacacgatgggggaaagcaggccctagaaaccgttcagcgactcctgcccgtcctgtgccaggaccacggcctgaccccagaccaggttgtggccatcgccagcaacataggtggcaagcaggccctcgaaaccgtccagagactgttaccggttctctgccaggaccacggcctgaccccagaacaggttgtggccatcgccagcaacataggtggcaagcaggccctcgaaaccgtccagagactgttaccggttctctgccaggcccacggcctgaccccagaccaggttgtggccatcgccagcaacataggtggcaagcaggccctcgaaaccgtccagagactgttaccggttctctgccaggcccacggcctgaccccagcccaagttgtcgcgattgcaagcaacaacggaggcaaacaagccttagaaacagtccagagattgttgccggtgctgtgccaagaccacggcctgacccctgagcaggtagtggctattgcatccaacaacgggggcagacccgcactggagtcaatcgtggcccagctttcgaggccggaccccgcgctggccgcactcactaatgatcatcttgtagcgctggcctgcctcggcggacgacccgccttggatgcggtgaagaaggggctcccgcacgcgcctgcattgattaagcggaccaacagaaggatccccgagaggacatcacatcgagtggcaggttccagcagggcagatcccaagaagaagcggaaagtaggaggaggaggaaccggaggaggaggctccgccgagtacgtgagggccctgttcgacttcaacggcaatgacgaggaggatctgccattcaagaagggcgacatcctgcggatcagagataagcccgaggagcagtggtggaacgccgaggactctgagggcaagcgcggcatgatcctggtgccttacgtggagaagtatagcggcgattacaaggaccacgatggcgactataaggatcacgacatcgattacaaggacgatgacgataagtctggcatgaccgacgccgagtatgtgcggatccacgagaagctggatatctacaccttcaagaagcagttctttaacaataagaagtccgtgtctcacagatgctatgtgctgttcgagctgaagcggagaggagagaggcgcgcatgtttttggggctacgccgtgaataagccacagagcggaaccgagaggggaatccacgccgagatcttctccatcaggaaagtggaggagtatctgcgcgacaaccctggccagtttacaatcaattggtacagctcctggagcccatgcgccgattgtgccgagaagatcctggagtggtataaccaggagctgagaggcaatggccacaccctgaagatctgggcctgcaagctgtactatgagaagaacgcccggaatcagatcggcctgtggaacctgagagacaatggcgtgggcctgaacgtgatggtgtctgagcactaccagtgctgtaggaagatcttcatccagtctagccacaatcagctgaacgagaatcgctggctggagaagacactgaagagggccgagaagtggcgcagcgagctgtccatcatgatccaggtgaagatcctgcacaccacaaagagcccagcagtgggatccggaggatctggaggaagcggaggatccaccaacctgtctgacatcatcgagaaggagacaggcaagcagctggtcatccaggagagcatcctgatgctgcccgaggaggtggaggaagtgatcggcaacaagcctgagtccgatatcctggtgcacaccgcctacgacgagtccacagatgagaatgtgatgctgctgacctctgacgccccagagtataagccctgggccctggtcatccaggatagcaacggcgagaataagatcaagatgctgtccggcggaagcggaggatccggaggctctaccaatctgtccgatattattgaaaaagagacaggcaagcaactggtcatccaggagtctatcctgatgctgccagaagaagtcgaagaagtgatcggaaacaagcccgaaagcgacatcctggtccatactgcctacgacgagagtaccgacgaaaatgtgatgttactgacctccgacgcccctgagtataagccatgggctctggtcatccaggactccaatggagaaaataagatcaagatgttaagcggcggctccaagagaacagccgacggctccgagttcgagcccaagaagaagcggaaagtg

SEQ ID NO: 46 - protein, 1325 aa, Artificial Sequence
  63-104-AID
MDYKDHDGDYKDHDIDYKDDDDKMAPKKKRKVGIHGVPAAVDLRTLGYSQQQQEKIKPKVRSTVAQHHEALVGHGFTHAHIVALSQHPAALGTVAVKYQDMIAALPEATHEAIVGVGKQWSGARALEALLTVAGELRGPPLQLDTGQLLKIAKRGGVTAVEAVHAWRNALTGAPLNLTPDQVVAIASNIGGKQALETVQRLLPVLCQDHGLTPEQVVAIASHDGGKQALETVQRLLPVLCQAHGLTPDQVVAIASNIGGKQALETVQRLLPVLCQAHGLTPAQVVAIASNNGGKQALETVQRLLPVLCQDHGLTPDQVVAIASNIGGKQALETVQRLLPVLCQDHGLTPEQVVAIASNIGGKQALETVQRLLPVLCQAHGLTPDQVVAIASNNGGKQALETVQRLLPVLCQAHGLTPAQVVAIASHDGGKQALETVQRLLPVLCQDHGLTPDQVVAIASNNGGKQALETVQRLLPVLCQDHGLTPEQVVAIASNNGGKQALETVQRLLPVLCQAHGLTPDQVVAIASNNGGKQALETVQRLLPVLCQAHGLTPAQVVAIASHDGGKQALETVQRLLPVLCQDHGLTPDQVVAIASNIGGKQALETVQRLLPVLCQDHGLTPEQVVAIASNIGGKQALETVQRLLPVLCQAHGLTPDQVVAIASNIGGKQALETVQRLLPVLCQAHGLTPAQVVAIASNNGGKQALETVQRLLPVLCQDHGLTPEQVVAIASNNGGRPALESIVAQLSRPDPALAALTNDHLVALACLGGRPALDAVKKGLPHAPALIKRTNRRIPERTSHRVAGSSRADPKKKRKVGGGGTGGGGSAEYVRALFDFNGNDEEDLPFKKGDILRIRDKPEEQWWNAEDSEGKRGMILVPYVEKYSGDYKDHDGDYKDHDIDYKDDDDKSGMTDAEYVRIHEKLDIYTFKKQFFNNKKSVSHRCYVLFELKRRGERRACFWGYAVNKPQSGTERGIHAEIFSIRKVEEYLRDNPGQFTINWYSSWSPCADCAEKILEWYNQELRGNGHTLKIWACKLYYEKNARNQIGLWNLRDNGVGLNVMVSEHYQCCRKIFIQSSHNQLNENRWLEKTLKRAEKWRSELSIMIQVKILHTTKSPAVGSGGSGGSGGSTNLSDIIEKETGKQLVIQESILMLPEEVEEVIGNKPESDILVHTAYDESTDENVMLLTSDAPEYKPWALVIQDSNGENKIKMLSGGSGGSGGSTNLSDIIEKETGKQLVIQESILMLPEEVEEVIGNKPESDILVHTAYDESTDENVMLLTSDAPEYKPWALVIQDSNGENKIKMLSGGSKRTADGSEFEPKKKRKV

SEQ ID NO: 47 - DNA, 3975 bp, Artificial Sequence
  63-104-AID-NC
atggactataaggaccacgacggagactacaaggatcatgatattgattacaaagacgatgacgataagatggccccaaagaagaagcggaaggtcggtatccacggagtcccagcagccgtagatttgagaactttgggatattcacagcagcagcaggaaaagatcaagcccaaagtgaggtcgacagtcgcgcagcatcacgaagcgctggtgggtcatgggtttacacatgcccacatcgtagccttgtcgcagcaccctgcagcccttggcacggtcgccgtcaagtaccaggacatgattgcggcgttgccggaagccacacatgaggcgatcgtcggtgtggggaaacagtggagcggagcccgagcgcttgaggccctgttgacggtcgcgggagagctgagagggcctccccttcagctggacacgggccagttgctgaagatcgcgaagcggggaggagtcacggcggtcgaggcggtacacgcgtggcgcaatgcgctcacgggagcacccctcaacctgacccccgaccaggttgtcgctattgctagtaacggcggaggcaaacaggcgctggaaacagttcagcgcctcttgccggtcttgtgtcaggaccacggcctgaccccagaacaagttgtcgcgattgcaagcaacaacggaggcaaacaagccttagaaacagtccagagattgttgccggtgctgtgccaagcccacggcctgaccccggaccaggtggttgcaatcgcgtcacacgatgggggaaagcaggccctagaaaccgttcagcgactcctgcccgtcctgtgccaggcccacggcctgaccccagcccaagttgtcgcgattgcaagcaacaacggaggcaaacaagccttagaaacagtccagagattgttgccggtgctgtgccaagaccacggcctgaccccggaccaggtggttgcaatcgcgtcacacgatgggggaaagcaggccctagaaaccgttcagcgactcctgcccgtcctgtgccaggaccacggcctgaccccagaacaagttgtcgcgattgcaagcaacaacggaggcaaacaagccttagaaacagtccagagattgttgccggtgctgtgccaagcccacggcctgacccccgaccaggttgtcgctattgctagtaacggcggaggcaaacaggcgctggaaacagttcagcgcctcttgccggtcttgtgtcaggcccacggcctgaccccagcccaggttgtggccatcgccagcaacataggtggcaagcaggccctcgaaaccgtccagagactgttaccggttctctgccaggaccacggcctgacccccgaccaggttgtcgctattgctagtaacggcggaggcaaacaggcgctggaaacagttcagcgcctcttgccggtcttgtgtcaggaccacggcctgaccccagaacaggttgtggccatcgccagcaacataggtggcaagcaggccctcgaaaccgtccagagactgttaccggttctctgccaggcccacggcctgaccccagaccaagttgtcgcgattgcaagcaacaacggaggcaaacaagccttagaaacagtccagagattgttgcctgtgctgtgccaagcccacggcctgacccccgcccaggttgtcgctattgctagtaacggcggaggcaaacaggcgctggaaacagttcagcgcctcttgccggtcttgtgtcaggaccacggcctgaccccggaccaggtggttgcaatcgcgtcacacgatgggggaaagcaggccctagaaaccgttcagcgactcctgcccgtcctgtgccaggaccacggcctgaccccagaacaagttgtcgcgattgcaagcaacaacggaggcaaacaagccttagaaacagtccagagattgttgccggtgctgtgccaagcccacggcctgaccccggaccaggtggttgcaatcgcgtcacacgatgggggaaagcaggccctagaaaccgttcagcgactcctgcccgtcctgtgccaggcccacggcctgaccccagcccaagttgtcgcgattgcaagcaacaacggaggcaaacaagccttagaaacagtccagagattgttgccggtgctgtgccaagaccacggcctgacccctgagcaggtagtggctattgcatccaacaacgggggcagacccgcactggagtcaatcgtggcccagctttcgaggccggaccccgcgctggccgcactcactaatgatcatcttgtagcgctggcctgcctcggcggacgacccgccttggatgcggtgaagaaggggctcccgcacgcgcctgcattgattaagcggaccaacagaaggatccccgagaggacatcacatcgagtggcaggttccagcagggcagatcccaagaagaagcggaaagtaggaggaggaggaaccggaggaggaggctccgccgagtacgtgagggccctgttcgacttcaacggcaatgacgaggaggatctgccattcaagaagggcgacatcctgcggatcagagataagcccgaggagcagtggtggaacgccgaggactctgagggcaagcgcggcatgatcctggtgccttacgtggagaagtatagcggcgattacaaggaccacgatggcgactataaggatcacgacatcgattacaaggacgatgacgataagtctggcatgaccgacgccgagtatgtgcggatccacgagaagctggatatctacaccttcaagaagcagttctttaacaataagaagtccgtgtctcacagatgctatgtgctgttcgagctgaagcggagaggagagaggcgcgcatgtttttggggctacgccgtgaataagccacagagcggaaccgagaggggaatccacgccgagatcttctccatcaggaaagtggaggagtatctgcgcgacaaccctggccagtttacaatcaattggtacagctcctggagcccatgcgccgattgtgccgagaagatcctggagtggtataaccaggagctgagaggcaatggccacaccctgaagatctgggcctgcaagctgtactatgagaagaacgcccggaatcagatcggcctgtggaacctgagagacaatggcgtgggcctgaacgtgatggtgtctgagcactaccagtgctgtaggaagatcttcatccagtctagccacaatcagctgaacgagaatcgctggctggagaagacactgaagagggccgagaagtggcgcagcgagctgtccatcatgatccaggtgaagatcctgcacaccacaaagagcccagcagtgggatccggaggatctggaggaagcggaggatccaccaacctgtctgacatcatcgagaaggagacaggcaagcagctggtcatccaggagagcatcctgatgctgcccgaggaggtggaggaagtgatcggcaacaagcctgagtccgatatcctggtgcacaccgcctacgacgagtccacagatgagaatgtgatgctgctgacctctgacgccccagagtataagccctgggccctggtcatccaggatagcaacggcgagaataagatcaagatgctgtccggcggaagcggaggatccggaggctctaccaatctgtccgatattattgaaaaagagacaggcaagcaactggtcatccaggagtctatcctgatgctgccagaagaagtcgaagaagtgatcggaaacaagcccgaaagcgacatcctggtccatactgcctacgacgagagtaccgacgaaaatgtgatgttactgacctccgacgcccctgagtataagccatgggctctggtcatccaggactccaatggagaaaataagatcaagatgttaagcggcggctccaagagaacagccgacggctccgagttcgagcccaagaagaagcggaaagtg

SEQ ID NO: 48 - protein, 1325 aa, Artificial Sequence
  63-104-AID-NC
MDYKDHDGDYKDHDIDYKDDDDKMAPKKKRKVGIHGVPAAVDLRTLGYSQQQQEKIKPKVRSTVAQHHEALVGHGFTHAHIVALSQHPAALGTVAVKYQDMIAALPEATHEAIVGVGKQWSGARALEALLTVAGELRGPPLQLDTGQLLKIAKRGGVTAVEAVHAWRNALTGAPLNLTPDQVVAIASNGGGKQALETVQRLLPVLCQDHGLTPEQVVAIASNNGGKQALETVQRLLPVLCQAHGLTPDQVVAIASHDGGKQALETVQRLLPVLCQAHGLTPAQVVAIASNNGGKQALETVQRLLPVLCQDHGLTPDQVVAIASHDGGKQALETVQRLLPVLCQDHGLTPEQVVAIASNNGGKQALETVQRLLPVLCQAHGLTPDQVVAIASNGGGKQALETVQRLLPVLCQAHGLTPAQVVAIASNIGGKQALETVQRLLPVLCQDHGLTPDQVVAIASNGGGKQALETVQRLLPVLCQDHGLTPEQVVAIASNIGGKQALETVQRLLPVLCQAHGLTPDQVVAIASNNGGKQALETVQRLLPVLCQAHGLTPAQVVAIASNGGGKQALETVQRLLPVLCQDHGLTPDQVVAIASHDGGKQALETVQRLLPVLCQDHGLTPEQVVAIASNNGGKQALETVQRLLPVLCQAHGLTPDQVVAIASHDGGKQALETVQRLLPVLCQAHGLTPAQVVAIASNNGGKQALETVQRLLPVLCQDHGLTPEQVVAIASNNGGRPALESIVAQLSRPDPALAALTNDHLVALACLGGRPALDAVKKGLPHAPALIKRTNRRIPERTSHRVAGSSRADPKKKRKVGGGGTGGGGSAEYVRALFDFNGNDEEDLPFKKGDILRIRDKPEEQWWNAEDSEGKRGMILVPYVEKYSGDYKDHDGDYKDHDIDYKDDDDKSGMTDAEYVRIHEKLDIYTFKKQFFNNKKSVSHRCYVLFELKRRGERRACFWGYAVNKPQSGTERGIHAEIFSIRKVEEYLRDNPGQFTINWYSSWSPCADCAEKILEWYNQELRGNGHTLKIWACKLYYEKNARNQIGLWNLRDNGVGLNVMVSEHYQCCRKIFIQSSHNQLNENRWLEKTLKRAEKWRSELSIMIQVKILHTTKSPAVGSGGSGGSGGSTNLSDIIEKETGKQLVIQESILMLPEEVEEVIGNKPESDILVHTAYDESTDENVMLLTSDAPEYKPWALVIQDSNGENKIKMLSGGSGGSGGSTNLSDIIEKETGKQLVIQESILMLPEEVEEVIGNKPESDILVHTAYDESTDENVMLLTSDAPEYKPWALVIQDSNGENKIKMLSGGSKRTADGSEFEPKKKRKV

SEQ ID NO: 49 - DNA, 3966 bp, Artificial Sequence
  47-104-AID
atggcttcctcccctccaaagaaaaagagaaaggttgcggccgctgactacaaggatgacgacgataaaagttggaaggacgcaagtggttggtctagaatgcatgcggccccgcgacggcgtgctgcgcaaccctccgacgcttcgccggccgcgcaggtggatctacgcacgctcggctacagtcagcagcagcaagagaagatcaaaccgaaggtgcgttcgacagtggcgcagcaccacgaggcactggtgggccatgggtttacacacgcgcacatcgttgcgctcagccaacacccggcagcgttagggaccgtcgctgtcacgtatcagcacataatcacggcgttgccagaggcgacacacgaagacatcgttggcgtcggcaaacagtggtccggcgcacgcgccctggaggccttgctcacggatgcgggggagttgagaggtccgccgttacagttggacacaggccaacttgtgaagattgcaaaacgtggcggcgtgaccgcaatggaggcagtgcatgcatcgcgcaatgcgctcacgggagcacccctcaacctgaccccagaccaggttgtggccatcgccagcaacataggtggcaagcaggccctcgaaaccgtccagagactgttaccggttctctgccaggaccacggcctgaccccggaacaggtggttgcaatcgcgtcacacgatgggggaaagcaggccctagaaaccgttcagcgactcctgcccgtcctgtgccaggcccacggcctgaccccagaccaggttgtggccatcgccagcaacataggtggcaagcaggccctcgaaaccgtccagagactgttaccggttctctgccaggcccacggcctgaccccagcccaagttgtcgcgattgcaagcaacaacggaggcaaacaagccttagaaacagtccagagattgttgccggtgctgtgccaagaccacggcctgaccccagaccaggttgtggccatcgccagcaacataggtggcaagcaggccctcgaaaccgtccagagactgttaccggttctctgccaggaccacggcctgaccccagaacaggttgtggccatcgccagcaacataggtggcaagcaggccctcgaaaccgtccagagactgttaccggttctctgccaggcccacggcctgaccccagaccaagttgtcgcgattgcaagcaacaacggaggcaaacaagccttagaaacagtccagagattgttgcctgtgctgtgccaagcccacggcctgaccccggcccaggtggttgcaatcgcgtcacacgatgggggaaagcaggccctagaaaccgttcagcgactcctgcccgtcctgtgccaggaccacggcctgaccccagaccaagttgtcgcgattgcaagcaacaacggaggcaaacaagccttagaaacagtccagagattgttgccggtgctgtgccaagaccacggcctgaccccagaacaagttgtcgcgattgcaagcaacaacggaggcaaacaagccttagaaacagtccagagattgttgccggtgctgtgccaagcccacggcctgaccccagaccaagttgtcgcgattgcaagcaacaacggaggcaaacaagccttagaaacagtccagagattgttgcctgtgctgtgccaagcccacggcctgaccccggcccaggtggttgcaatcgcgtcacacgatgggggaaagcaggccctagaaaccgttcagcgactcctgcccgtcctgtgccaggaccacggcctgaccccagaccaggttgtggccatcgccagcaacataggtggcaagcaggccctcgaaaccgtccagagactgttaccggttctctgccaggaccacggcctgaccccagaacaggttgtggccatcgccagcaacataggtggcaagcaggccctcgaaaccgtccagagactgttaccggttctctgccaggcccacggcctgaccccagaccaggttgtggccatcgccagcaacataggtggcaagcaggccctcgaaaccgtccagagactgttaccggttctctgccaggcccacggcctgaccccagcccaagttgtcgcgattgcaagcaacaacggaggcaaacaagccttagaaacagtccagagattgttgccggtgctgtgccaagaccacggcctgacccctgagcaggtagtggctattgcatccaacaacgggggcagacccgcactggagtcaatcgtggcccagctttcgaggccggaccccgcgctggccgcactcactaatgatcatcttgtagcgctggcctgcctcggcggacgtcctgccatggatgcagtgaaaaagggattgccgcacgcgccggaattgatcagatccagcagggcagatcccaagaagaagcggaaagtaggaggaggaggaaccggaggaggaggctccgccgagtacgtgagggccctgttcgacttcaacggcaatgacgaggaggatctgccattcaagaagggcgacatcctgcggatcagagataagcccgaggagcagtggtggaacgccgaggactctgagggcaagcgcggcatgatcctggtgccttacgtggagaagtatagcggcgattacaaggaccacgatggcgactataaggatcacgacatcgattacaaggacgatgacgataagtctggcatgaccgacgccgagtatgtgcggatccacgagaagctggatatctacaccttcaagaagcagttctttaacaataagaagtccgtgtctcacagatgctatgtgctgttcgagctgaagcggagaggagagaggcgcgcatgtttttggggctacgccgtgaataagccacagagcggaaccgagaggggaatccacgccgagatcttctccatcaggaaagtggaggagtatctgcgcgacaaccctggccagtttacaatcaattggtacagctcctggagcccatgcgccgattgtgccgagaagatcctggagtggtataaccaggagctgagaggcaatggccacaccctgaagatctgggcctgcaagctgtactatgagaagaacgcccggaatcagatcggcctgtggaacctgagagacaatggcgtgggcctgaacgtgatggtgtctgagcactaccagtgctgtaggaagatcttcatccagtctagccacaatcagctgaacgagaatcgctggctggagaagacactgaagagggccgagaagtggcgcagcgagctgtccatcatgatccaggtgaagatcctgcacaccacaaagagcccagcagtgggatccggaggatctggaggaagcggaggatccaccaacctgtctgacatcatcgagaaggagacaggcaagcagctggtcatccaggagagcatcctgatgctgcccgaggaggtggaggaagtgatcggcaacaagcctgagtccgatatcctggtgcacaccgcctacgacgagtccacagatgagaatgtgatgctgctgacctctgacgccccagagtataagccctgggccctggtcatccaggatagcaacggcgagaataagatcaagatgctgtccggcggaagcggaggatccggaggctctaccaatctgtccgatattattgaaaaagagacaggcaagcaactggtcatccaggagtctatcctgatgctgccagaagaagtcgaagaagtgatcggaaacaagcccgaaagcgacatcctggtccatactgcctacgacgagagtaccgacgaaaatgtgatgttactgacctccgacgcccctgagtataagccatgggctctggtcatccaggactccaatggagaaaataagatcaagatgttaagcggcggctccaagagaacagccgacggctccgagttcgagcccaagaagaagcggaaagtg

SEQ ID NO: 50 - protein, 1322 aa, Artificial Sequence
  47-104-AID
MASSPPKKKRKVAAADYKDDDDKSWKDASGWSRMHAAPRRRAAQPSDASPAAQVDLRTLGYSQQQQEKIKPKVRSTVAQHHEALVGHGFTHAHIVALSQHPAALGTVAVTYQHIITALPEATHEDIVGVGKQWSGARALEALLTDAGELRGPPLQLDTGQLVKIAKRGGVTAMEAVHASRNALTGAPLNLTPDQVVAIASNIGGKQALETVQRLLPVLCQDHGLTPEQVVAIASHDGGKQALETVQRLLPVLCQAHGLTPDQVVAIASNIGGKQALETVQRLLPVLCQAHGLTPAQVVAIASNNGGKQALETVQRLLPVLCQDHGLTPDQVVAIASNIGGKQALETVQRLLPVLCQDHGLTPEQVVAIASNIGGKQALETVQRLLPVLCQAHGLTPDQVVAIASNNGGKQALETVQRLLPVLCQAHGLTPAQVVAIASHDGGKQALETVQRLLPVLCQDHGLTPDQVVAIASNNGGKQALETVQRLLPVLCQDHGLTPEQVVAIASNNGGKQALETVQRLLPVLCQAHGLTPDQVVAIASNNGGKQALETVQRLLPVLCQAHGLTPAQVVAIASHDGGKQALETVQRLLPVLCQDHGLTPDQVVAIASNIGGKQALETVQRLLPVLCQDHGLTPEQVVAIASNIGGKQALETVQRLLPVLCQAHGLTPDQVVAIASNIGGKQALETVQRLLPVLCQAHGLTPAQVVAIASNNGGKQALETVQRLLPVLCQDHGLTPEQVVAIASNNGGRPALESIVAQLSRPDPALAALTNDHLVALACLGGRPAMDAVKKGLPHAPELIRSSRADPKKKRKVGGGGTGGGGSAEYVRALFDFNGNDEEDLPFKKGDILRIRDKPEEQWWNAEDSEGKRGMILVPYVEKYSGDYKDHDGDYKDHDIDYKDDDDKSGMTDAEYVRIHEKLDIYTFKKQFFNNKKSVSHRCYVLFELKRRGERRACFWGYAVNKPQSGTERGIHAEIFSIRKVEEYLRDNPGQFTINWYSSWSPCADCAEKILEWYNQELRGNGHTLKIWACKLYYEKNARNQIGLWNLRDNGVGLNVMVSEHYQCCRKIFIQSSHNQLNENRWLEKTLKRAEKWRSELSIMIQVKILHTTKSPAVGSGGSGGSGGSTNLSDIIEKETGKQLVIQESILMLPEEVEEVIGNKPESDILVHTAYDESTDENVMLLTSDAPEYKPWALVIQDSNGENKIKMLSGGSGGSGGSTNLSDIIEKETGKQLVIQESILMLPEEVEEVIGNKPESDILVHTAYDESTDENVMLLTSDAPEYKPWALVIQDSNGENKIKMLSGGSKRTADGSEFEPKKKRKV

SEQ ID NO: 51 - DNA, 3966 bp, Artificial Sequence
  47-104-AID-NC
atggcttcctcccctccaaagaaaaagagaaaggttgcggccgctgactacaaggatgacgacgataaaagttggaaggacgcaagtggttggtctagaatgcatgcggccccgcgacggcgtgctgcgcaaccctccgacgcttcgccggccgcgcaggtggatctacgcacgctcggctacagtcagcagcagcaagagaagatcaaaccgaaggtgcgttcgacagtggcgcagcaccacgaggcactggtgggccatgggtttacacacgcgcacatcgttgcgctcagccaacacccggcagcgttagggaccgtcgctgtcacgtatcagcacataatcacggcgttgccagaggcgacacacgaagacatcgttggcgtcggcaaacagtggtccggcgcacgcgccctggaggccttgctcacggatgcgggggagttgagaggtccgccgttacagttggacacaggccaacttgtgaagattgcaaaacgtggcggcgtgaccgcaatggaggcagtgcatgcatcgcgcaatgcgctcacgggagcacccctcaacctgacccccgaccaggttgtcgctattgctagtaacggcggaggcaaacaggcgctggaaacagttcagcgcctcttgccggtcttgtgtcaggaccacggcctgaccccagaacaagttgtcgcgattgcaagcaacaacggaggcaaacaagccttagaaacagtccagagattgttgccggtgctgtgccaagcccacggcctgaccccggaccaggtggttgcaatcgcgtcacacgatgggggaaagcaggccctagaaaccgttcagcgactcctgcccgtcctgtgccaggcccacggcctgaccccagcccaagttgtcgcgattgcaagcaacaacggaggcaaacaagccttagaaacagtccagagattgttgccggtgctgtgccaagaccacggcctgaccccggaccaggtggttgcaatcgcgtcacacgatgggggaaagcaggccctagaaaccgttcagcgactcctgcccgtcctgtgccaggaccacggcctgaccccagaacaagttgtcgcgattgcaagcaacaacggaggcaaacaagccttagaaacagtccagagattgttgccggtgctgtgccaagcccacggcctgacccccgaccaggttgtcgctattgctagtaacggcggaggcaaacaggcgctggaaacagttcagcgcctcttgccggtcttgtgtcaggcccacggcctgaccccagcccaggttgtggccatcgccagcaacataggtggcaagcaggccctcgaaaccgtccagagactgttaccggttctctgccaggaccacggcctgacccccgaccaggttgtcgctattgctagtaacggcggaggcaaacaggcgctggaaacagttcagcgcctcttgccggtcttgtgtcaggaccacggcctgaccccagaacaggttgtggccatcgccagcaacataggtggcaagcaggccctcgaaaccgtccagagactgttaccggttctctgccaggcccacggcctgaccccagaccaagttgtcgcgattgcaagcaacaacggaggcaaacaagccttagaaacagtccagagattgttgcctgtgctgtgccaagcccacggcctgacccccgcccaggttgtcgctattgctagtaacggcggaggcaaacaggcgctggaaacagttcagcgcctcttgccggtcttgtgtcaggaccacggcctgaccccggaccaggtggttgcaatcgcgtcacacgatgggggaaagcaggccctagaaaccgttcagcgactcctgcccgtcctgtgccaggaccacggcctgaccccagaacaagttgtcgcgattgcaagcaacaacggaggcaaacaagccttagaaacagtccagagattgttgccggtgctgtgccaagcccacggcctgaccccggaccaggtggttgcaatcgcgtcacacgatgggggaaagcaggccctagaaaccgttcagcgactcctgcccgtcctgtgccaggcccacggcctgaccccagcccaagttgtcgcgattgcaagcaacaacggaggcaaacaagccttagaaacagtccagagattgttgccggtgctgtgccaagaccacggcctgacccctgagcaggtagtggctattgcatccaacaacgggggcagacccgcactggagtcaatcgtggcccagctttcgaggccggaccccgcgctggccgcactcactaatgatcatcttgtagcgctggcctgcctcggcggacgtcctgccatggatgcagtgaaaaagggattgccgcacgcgccggaattgatcagatccagcagggcagatcccaagaagaagcggaaagtaggaggaggaggaaccggaggaggaggctccgccgagtacgtgagggccctgttcgacttcaacggcaatgacgaggaggatctgccattcaagaagggcgacatcctgcggatcagagataagcccgaggagcagtggtggaacgccgaggactctgagggcaagcgcggcatgatcctggtgccttacgtggagaagtatagcggcgattacaaggaccacgatggcgactataaggatcacgacatcgattacaaggacgatgacgataagtctggcatgaccgacgccgagtatgtgcggatccacgagaagctggatatctacaccttcaagaagcagttctttaacaataagaagtccgtgtctcacagatgctatgtgctgttcgagctgaagcggagaggagagaggcgcgcatgtttttggggctacgccgtgaataagccacagagcggaaccgagaggggaatccacgccgagatcttctccatcaggaaagtggaggagtatctgcgcgacaaccctggccagtttacaatcaattggtacagctcctggagcccatgcgccgattgtgccgagaagatcctggagtggtataaccaggagctgagaggcaatggccacaccctgaagatctgggcctgcaagctgtactatgagaagaacgcccggaatcagatcggcctgtggaacctgagagacaatggcgtgggcctgaacgtgatggtgtctgagcactaccagtgctgtaggaagatcttcatccagtctagccacaatcagctgaacgagaatcgctggctggagaagacactgaagagggccgagaagtggcgcagcgagctgtccatcatgatccaggtgaagatcctgcacaccacaaagagcccagcagtgggatccggaggatctggaggaagcggaggatccaccaacctgtctgacatcatcgagaaggagacaggcaagcagctggtcatccaggagagcatcctgatgctgcccgaggaggtggaggaagtgatcggcaacaagcctgagtccgatatcctggtgcacaccgcctacgacgagtccacagatgagaatgtgatgctgctgacctctgacgccccagagtataagccctgggccctggtcatccaggatagcaacggcgagaataagatcaagatgctgtccggcggaagcggaggatccggaggctctaccaatctgtccgatattattgaaaaagagacaggcaagcaactggtcatccaggagtctatcctgatgctgccagaagaagtcgaagaagtgatcggaaacaagcccgaaagcgacatcctggtccatactgcctacgacgagagtaccgacgaaaatgtgatgttactgacctccgacgcccctgagtataagccatgggctctggtcatccaggactccaatggagaaaataagatcaagatgttaagcggcggctccaagagaacagccgacggctccgagttcgagcccaagaagaagcggaaagtg

SEQ ID NO: 52 - protein, 1322 aa, Artificial Sequence
  47-104-AID-NC
MASSPPKKKRKVAAADYKDDDDKSWKDASGWSRMHAAPRRRAAQPSDASPAAQVDLRTLGYSQQQQEKIKPKVRSTVAQHHEALVGHGFTHAHIVALSQHPAALGTVAVTYQHIITALPEATHEDIVGVGKQWSGARALEALLTDAGELRGPPLQLDTGQLVKIAKRGGVTAMEAVHASRNALTGAPLNLTPDQVVAIASNGGGKQALETVQRLLPVLCQDHGLTPEQVVAIASNNGGKQALETVQRLLPVLCQAHGLTPDQVVAIASHDGGKQALETVQRLLPVLCQAHGLTPAQVVAIASNNGGKQALETVQRLLPVLCQDHGLTPDQVVAIASHDGGKQALETVQRLLPVLCQDHGLTPEQVVAIASNNGGKQALETVQRLLPVLCQAHGLTPDQVVAIASNGGGKQALETVQRLLPVLCQAHGLTPAQVVAIASNIGGKQALETVQRLLPVLCQDHGLTPDQVVAIASNGGGKQALETVQRLLPVLCQDHGLTPEQVVAIASNIGGKQALETVQRLLPVLCQAHGLTPDQVVAIASNNGGKQALETVQRLLPVLCQAHGLTPAQVVAIASNGGGKQALETVQRLLPVLCQDHGLTPDQVVAIASHDGGKQALETVQRLLPVLCQDHGLTPEQVVAIASNNGGKQALETVQRLLPVLCQAHGLTPDQVVAIASHDGGKQALETVQRLLPVLCQAHGLTPAQVVAIASNNGGKQALETVQRLLPVLCQDHGLTPEQVVAIASNNGGRPALESIVAQLSRPDPALAALTNDHLVALACLGGRPAMDAVKKGLPHAPELIRSSRADPKKKRKVGGGGTGGGGSAEYVRALFDFNGNDEEDLPFKKGDILRIRDKPEEQWWNAEDSEGKRGMILVPYVEKYSGDYKDHDGDYKDHDIDYKDDDDKSGMTDAEYVRIHEKLDIYTFKKQFFNNKKSVSHRCYVLFELKRRGERRACFWGYAVNKPQSGTERGIHAEIFSIRKVEEYLRDNPGQFTINWYSSWSPCADCAEKILEWYNQELRGNGHTLKIWACKLYYEKNARNQIGLWNLRDNGVGLNVMVSEHYQCCRKIFIQSSHNQLNENRWLEKTLKRAEKWRSELSIMIQVKILHTTKSPAVGSGGSGGSGGSTNLSDIIEKETGKQLVIQESILMLPEEVEEVIGNKPESDILVHTAYDESTDENVMLLTSDAPEYKPWALVIQDSNGENKIKMLSGGSGGSGGSTNLSDIIEKETGKQLVIQESILMLPEEVEEVIGNKPESDILVHTAYDESTDENVMLLTSDAPEYKPWALVIQDSNGENKIKMLSGGSKRTADGSEFEPKKKRKV

SEQ ID NO: 53 - DNA, 4044 bp, Artificial Sequence
  WT-12-AID
atggactataaggaccacgacggagactacaaggatcatgatattgattacaaagacgatgacgataagatggccccaaagaagaagcggaaggtcggtatccacggagtcccagcagccgtagatttgagaactttgggatattcacagcagcagcaggaaaagatcaagcccaaagtgaggtcgacagtcgcgcagcatcacgaagcgctggtgggtcatgggtttacacatgcccacatcgtagccttgtcgcagcaccctgcagcccttggcacggtcgccgtcaagtaccaggacatgattgcggcgttgccggaagccacacatgaggcgatcgtcggtgtggggaaacagtggagcggagcccgagcgcttgaggccctgttgacggtcgcgggagagctgagagggcctccccttcagctggacacgggccagttgctgaagatcgcgaagcggggaggagtcacggcggtcgaggcggtacacgcgtggcgcaatgcgctcacgggagcacccctcaacctgaccccagaccaggttgtggccatcgccagcaacataggtggcaagcaggccctcgaaaccgtccagagactgttaccggttctctgccaggaccacggcctgaccccggaacaggtggttgcaatcgcgtcacacgatgggggaaagcaggccctagaaaccgttcagcgactcctgcccgtcctgtgccaggcccacggcctgaccccagaccaggttgtggccatcgccagcaacataggtggcaagcaggccctcgaaaccgtccagagactgttaccggttctctgccaggcccacggcctgaccccagcccaagttgtcgcgattgcaagcaacaacggaggcaaacaagccttagaaacagtccagagattgttgccggtgctgtgccaagaccacggcctgaccccagaccaggttgtggccatcgccagcaacataggtggcaagcaggccctcgaaaccgtccagagactgttaccggttctctgccaggaccacggcctgaccccagaacaggttgtggccatcgccagcaacataggtggcaagcaggccctcgaaaccgtccagagactgttaccggttctctgccaggcccacggcctgaccccagaccaagttgtcgcgattgcaagcaacaacggaggcaaacaagccttagaaacagtccagagattgttgcctgtgctgtgccaagcccacggcctgaccccggcccaggtggttgcaatcgcgtcacacgatgggggaaagcaggccctagaaaccgttcagcgactcctgcccgtcctgtgccaggaccacggcctgaccccagaccaagttgtcgcgattgcaagcaacaacggaggcaaacaagccttagaaacagtccagagattgttgccggtgctgtgccaagaccacggcctgaccccagaacaagttgtcgcgattgcaagcaacaacggaggcaaacaagccttagaaacagtccagagattgttgccggtgctgtgccaagcccacggcctgaccccagaccaagttgtcgcgattgcaagcaacaacggaggcaaacaagccttagaaacagtccagagattgttgcctgtgctgtgccaagcccacggcctgaccccggcccaggtggttgcaatcgcgtcacacgatgggggaaagcaggccctagaaaccgttcagcgactcctgcccgtcctgtgccaggaccacggcctgaccccagaccaggttgtggccatcgccagcaacataggtggcaagcaggccctcgaaaccgtccagagactgttaccggttctctgccaggaccacggcctgaccccagaacaggttgtggccatcgccagcaacataggtggcaagcaggccctcgaaaccgtccagagactgttaccggttctctgccaggcccacggcctgaccccagaccaggttgtggccatcgccagcaacataggtggcaagcaggccctcgaaaccgtccagagactgttaccggttctctgccaggcccacggcctgaccccagcccaagttgtcgcgattgcaagcaacaacggaggcaaacaagccttagaaacagtccagagattgttgccggtgctgtgccaagaccacggcctgacccctgagcaggtagtggctattgcatccaacaacgggggcagacccgcactggagtcaatcgtggcccagctctcgaggccggaccccgcgctggccgcactcactaatgatcatcttgtagcgctggcctgcctcggcggacgacccgccttggatgcggtgaagaaggggctcccgcacgcgcctgcattgattaagcggaccaacagaaggatccccgagaggacatcacatcgagtggcagatcacgcgcaagtggtccgcgtgctcggattcttccagtgtcactcccaccccgcacaagcgttcgatgacgccatgactcaatttggtatgtcgagacacggactgctgcagctctttcgtagagtcggtgtcacagaactggaggcccgctcgggcacactgcctcccgcctcccagcggtgggacaggattctccaagcgagcggtatgaaacgcgcgaagccttcacctacgtcaactcagacacctgaccaggcgagccttcatgcgttcgcagactcgctggagagggatttggacgcgccctcgcccatgcatgaaggggaccaaactcgcgcgtcagccagcgctagccccaagaagaagagaaaggtggaggccagcatgaccgacgccgagtatgtgcggatccacgagaagctggatatctacaccttcaagaagcagttctttaacaataagaagtccgtgtctcacagatgctatgtgctgttcgagctgaagcggagaggagagaggcgcgcatgtttttggggctacgccgtgaataagccacagagcggaaccgagaggggaatccacgccgagatcttctccatcaggaaagtggaggagtatctgcgcgacaaccctggccagtttacaatcaattggtacagctcctggagcccatgcgccgattgtgccgagaagatcctggagtggtataaccaggagctgagaggcaatggccacaccctgaagatctgggcctgcaagctgtactatgagaagaacgcccggaatcagatcggcctgtggaacctgagagacaatggcgtgggcctgaacgtgatggtgtctgagcactaccagtgctgtaggaagatcttcatccagtctagccacaatcagctgaacgagaatcgctggctggagaagacactgaagagggccgagaagtggcgcagcgagctgtccatcatgatccaggtgaagatcctgcacaccacaaagagcccagcagtgggatccggaggatctggaggaagcggaggatccaccaacctgtctgacatcatcgagaaggagacaggcaagcagctggtcatccaggagagcatcctgatgctgcccgaggaggtggaggaagtgatcggcaacaagcctgagtccgatatcctggtgcacaccgcctacgacgagtccacagatgagaatgtgatgctgctgacctctgacgccccagagtataagccctgggccctggtcatccaggatagcaacggcgagaataagatcaagatgctgtccggcggaagcggaggatccggaggctctaccaatctgtccgatattattgaaaaagagacaggcaagcaactggtcatccaggagtctatcctgatgctgccagaagaagtcgaagaagtgatcggaaacaagcccgaaagcgacatcctggtccatactgcctacgacgagagtaccgacgaaaatgtgatgttactgacctccgacgcccctgagtataagccatgggctctggtcatccaggactccaatggagaaaataagatcaagatgttaagcggcggctccaagagaacagccgacggctccgagttcgagcccaagaagaagcggaaagtg

SEQ ID NO: 54 - protein, 1348 aa, Artificial Sequence
  WT-12-AID
MDYKDHDGDYKDHDIDYKDDDDKMAPKKKRKVGIHGVPAAVDLRTLGYSQQQQEKIKPKVRSTVAQHHEALVGHGFTHAHIVALSQHPAALGTVAVKYQDMIAALPEATHEAIVGVGKQWSGARALEALLTVAGELRGPPLQLDTGQLLKIAKRGGVTAVEAVHAWRNALTGAPLNLTPDQVVAIASNIGGKQALETVQRLLPVLCQDHGLTPEQVVAIASHDGGKQALETVQRLLPVLCQAHGLTPDQVVAIASNIGGKQALETVQRLLPVLCQAHGLTPAQVVAIASNNGGKQALETVQRLLPVLCQDHGLTPDQVVAIASNIGGKQALETVQRLLPVLCQDHGLTPEQVVAIASNIGGKQALETVQRLLPVLCQAHGLTPDQVVAIASNNGGKQALETVQRLLPVLCQAHGLTPAQVVAIASHDGGKQALETVQRLLPVLCQDHGLTPDQVVAIASNNGGKQALETVQRLLPVLCQDHGLTPEQVVAIASNNGGKQALETVQRLLPVLCQAHGLTPDQVVAIASNNGGKQALETVQRLLPVLCQAHGLTPAQVVAIASHDGGKQALETVQRLLPVLCQDHGLTPDQVVAIASNIGGKQALETVQRLLPVLCQDHGLTPEQVVAIASNIGGKQALETVQRLLPVLCQAHGLTPDQVVAIASNIGGKQALETVQRLLPVLCQAHGLTPAQVVAIASNNGGKQALETVQRLLPVLCQDHGLTPEQVVAIASNNGGRPALESIVAQLSRPDPALAALTNDHLVALACLGGRPALDAVKKGLPHAPALIKRTNRRIPERTSHRVADHAQVVRVLGFFQCHSHPAQAFDDAMTQFGMSRHGLLQLFRRVGVTELEARSGTLPPASQRWDRILQASGMKRAKPSPTSTQTPDQASLHAFADSLERDLDAPSPMHEGDQTRASASASPKKKRKVEASMTDAEYVRIHEKLDIYTFKKQFFNNKKSVSHRCYVLFELKRRGERRACFWGYAVNKPQSGTERGIHAEIFSIRKVEEYLRDNPGQFTINWYSSWSPCADCAEKILEWYNQELRGNGHTLKIWACKLYYEKNARNQIGLWNLRDNGVGLNVMVSEHYQCCRKIFIQSSHNQLNENRWLEKTLKRAEKWRSELSIMIQVKILHTTKSPAVGSGGSGGSGGSTNLSDIIEKETGKQLVIQESILMLPEEVEEVIGNKPESDILVHTAYDESTDENVMLLTSDAPEYKPWALVIQDSNGENKIKMLSGGSGGSGGSTNLSDIIEKETGKQLVIQESILMLPEEVEEVIGNKPESDILVHTAYDESTDENVMLLTSDAPEYKPWALVIQDSNGENKIKMLSGGSKRTADGSEFEPKKKRKV

SEQ ID NO: 55 - DNA, 4044 bp, Artificial Sequence
  WT-12-AID-NC
atggactataaggaccacgacggagactacaaggatcatgatattgattacaaagacgatgacgataagatggccccaaagaagaagcggaaggtcggtatccacggagtcccagcagccgtagatttgagaactttgggatattcacagcagcagcaggaaaagatcaagcccaaagtgaggtcgacagtcgcgcagcatcacgaagcgctggtgggtcatgggtttacacatgcccacatcgtagccttgtcgcagcaccctgcagcccttggcacggtcgccgtcaagtaccaggacatgattgcggcgttgccggaagccacacatgaggcgatcgtcggtgtggggaaacagtggagcggagcccgagcgcttgaggccctgttgacggtcgcgggagagctgagagggcctccccttcagctggacacgggccagttgctgaagatcgcgaagcggggaggagtcacggcggtcgaggcggtacacgcgtggcgcaatgcgctcacgggagcacccctcaacctgacccccgaccaggttgtcgctattgctagtaacggcggaggcaaacaggcgctggaaacagttcagcgcctcttgccggtcttgtgtcaggaccacggcctgaccccagaacaagttgtcgcgattgcaagcaacaacggaggcaaacaagccttagaaacagtccagagattgttgccggtgctgtgccaagcccacggcctgaccccggaccaggtggttgcaatcgcgtcacacgatgggggaaagcaggccctagaaaccgttcagcgactcctgcccgtcctgtgccaggcccacggcctgaccccagcccaagttgtcgcgattgcaagcaacaacggaggcaaacaagccttagaaacagtccagagattgttgccggtgctgtgccaagaccacggcctgaccccggaccaggtggttgcaatcgcgtcacacgatgggggaaagcaggccctagaaaccgttcagcgactcctgcccgtcctgtgccaggaccacggcctgaccccagaacaagttgtcgcgattgcaagcaacaacggaggcaaacaagccttagaaacagtccagagattgttgccggtgctgtgccaagcccacggcctgacccccgaccaggttgtcgctattgctagtaacggcggaggcaaacaggcgctggaaacagttcagcgcctcttgccggtcttgtgtcaggcccacggcctgaccccagcccaggttgtggccatcgccagcaacataggtggcaagcaggccctcgaaaccgtccagagactgttaccggttctctgccaggaccacggcctgacccccgaccaggttgtcgctattgctagtaacggcggaggcaaacaggcgctggaaacagttcagcgcctcttgccggtcttgtgtcaggaccacggcctgaccccagaacaggttgtggccatcgccagcaacataggtggcaagcaggccctcgaaaccgtccagagactgttaccggttctctgccaggcccacggcctgaccccagaccaagttgtcgcgattgcaagcaacaacggaggcaaacaagccttagaaacagtccagagattgttgcctgtgctgtgccaagcccacggcctgacccccgcccaggttgtcgctattgctagtaacggcggaggcaaacaggcgctggaaacagttcagcgcctcttgccggtcttgtgtcaggaccacggcctgaccccggaccaggtggttgcaatcgcgtcacacgatgggggaaagcaggccctagaaaccgttcagcgactcctgcccgtcctgtgccaggaccacggcctgaccccagaacaagttgtcgcgattgcaagcaacaacggaggcaaacaagccttagaaacagtccagagattgttgccggtgctgtgccaagcccacggcctgaccccggaccaggtggttgcaatcgcgtcacacgatgggggaaagcaggccctagaaaccgttcagcgactcctgcccgtcctgtgccaggcccacggcctgaccccagcccaagttgtcgcgattgcaagcaacaacggaggcaaacaagccttagaaacagtccagagattgttgccggtgctgtgccaagaccacggcctgacccctgagcaggtagtggctattgcatccaacaacgggggcagacccgcactggagtcaatcgtggcccagctctcgaggccggaccccgcgctggccgcactcactaatgatcatcttgtagcgctggcctgcctcggcggacgacccgccttggatgcggtgaagaaggggctcccgcacgcgcctgcattgattaagcggaccaacagaaggatccccgagaggacatcacatcgagtggcagatcacgcgcaagtggtccgcgtgctcggattcttccagtgtcactcccaccccgcacaagcgttcgatgacgccatgactcaatttggtatgtcgagacacggactgctgcagctctttcgtagagtcggtgtcacagaactggaggcccgctcgggcacactgcctcccgcctcccagcggtgggacaggattctccaagcgagcggtatgaaacgcgcgaagccttcacctacgtcaactcagacacctgaccaggcgagccttcatgcgttcgcagactcgctggagagggatttggacgcgccctcgcccatgcatgaaggggaccaaactcgcgcgtcagccagcgctagccccaagaagaagagaaaggtggaggccagcatgaccgacgccgagtatgtgcggatccacgagaagctggatatctacaccttcaagaagcagttctttaacaataagaagtccgtgtctcacagatgctatgtgctgttcgagctgaagcggagaggagagaggcgcgcatgtttttggggctacgccgtgaataagccacagagcggaaccgagaggggaatccacgccgagatcttctccatcaggaaagtggaggagtatctgcgcgacaaccctggccagtttacaatcaattggtacagctcctggagcccatgcgccgattgtgccgagaagatcctggagtggtataaccaggagctgagaggcaatggccacaccctgaagatctgggcctgcaagctgtactatgagaagaacgcccggaatcagatcggcctgtggaacctgagagacaatggcgtgggcctgaacgtgatggtgtctgagcactaccagtgctgtaggaagatcttcatccagtctagccacaatcagctgaacgagaatcgctggctggagaagacactgaagagggccgagaagtggcgcagcgagctgtccatcatgatccaggtgaagatcctgcacaccacaaagagcccagcagtgggatccggaggatctggaggaagcggaggatccaccaacctgtctgacatcatcgagaaggagacaggcaagcagctggtcatccaggagagcatcctgatgctgcccgaggaggtggaggaagtgatcggcaacaagcctgagtccgatatcctggtgcacaccgcctacgacgagtccacagatgagaatgtgatgctgctgacctctgacgccccagagtataagccctgggccctggtcatccaggatagcaacggcgagaataagatcaagatgctgtccggcggaagcggaggatccggaggctctaccaatctgtccgatattattgaaaaagagacaggcaagcaactggtcatccaggagtctatcctgatgctgccagaagaagtcgaagaagtgatcggaaacaagcccgaaagcgacatcctggtccatactgcctacgacgagagtaccgacgaaaatgtgatgttactgacctccgacgcccctgagtataagccatgggctctggtcatccaggactccaatggagaaaataagatcaagatgttaagcggcggctccaagagaacagccgacggctccgagttcgagcccaagaagaagcggaaagtg

SEQ ID NO: 56 - protein, 1348 aa, Artificial Sequence
  WT-12-AID-NC
MDYKDHDGDYKDHDIDYKDDDDKMAPKKKRKVGIHGVPAAVDLRTLGYSQQQQEKIKPKVRSTVAQHHEALVGHGFTHAHIVALSQHPAALGTVAVKYQDMIAALPEATHEAIVGVGKQWSGARALEALLTVAGELRGPPLQLDTGQLLKIAKRGGVTAVEAVHAWRNALTGAPLNLTPDQVVAIASNGGGKQALETVQRLLPVLCQDHGLTPEQVVAIASNNGGKQALETVQRLLPVLCQAHGLTPDQVVAIASHDGGKQALETVQRLLPVLCQAHGLTPAQVVAIASNNGGKQALETVQRLLPVLCQDHGLTPDQVVAIASHDGGKQALETVQRLLPVLCQDHGLTPEQVVAIASNNGGKQALETVQRLLPVLCQAHGLTPDQVVAIASNGGGKQALETVQRLLPVLCQAHGLTPAQVVAIASNIGGKQALETVQRLLPVLCQDHGLTPDQVVAIASNGGGKQALETVQRLLPVLCQDHGLTPEQVVAIASNIGGKQALETVQRLLPVLCQAHGLTPDQVVAIASNNGGKQALETVQRLLPVLCQAHGLTPAQVVAIASNGGGKQALETVQRLLPVLCQDHGLTPDQVVAIASHDGGKQALETVQRLLPVLCQDHGLTPEQVVAIASNNGGKQALETVQRLLPVLCQAHGLTPDQVVAIASHDGGKQALETVQRLLPVLCQAHGLTPAQVVAIASNNGGKQALETVQRLLPVLCQDHGLTPEQVVAIASNNGGRPALESIVAQLSRPDPALAALTNDHLVALACLGGRPALDAVKKGLPHAPALIKRTNRRIPERTSHRVADHAQVVRVLGFFQCHSHPAQAFDDAMTQFGMSRHGLLQLFRRVGVTELEARSGTLPPASQRWDRILQASGMKRAKPSPTSTQTPDQASLHAFADSLERDLDAPSPMHEGDQTRASASASPKKKRKVEASMTDAEYVRIHEKLDIYTFKKQFFNNKKSVSHRCYVLFELKRRGERRACFWGYAVNKPQSGTERGIHAEIFSIRKVEEYLRDNPGQFTINWYSSWSPCADCAEKILEWYNQELRGNGHTLKIWACKLYYEKNARNQIGLWNLRDNGVGLNVMVSEHYQCCRKIFIQSSHNQLNENRWLEKTLKRAEKWRSELSIMIQVKILHTTKSPAVGSGGSGGSGGSTNLSDIIEKETGKQLVIQESILMLPEEVEEVIGNKPESDILVHTAYDESTDENVMLLTSDAPEYKPWALVIQDSNGENKIKMLSGGSGGSGGSTNLSDIIEKETGKQLVIQESILMLPEEVEEVIGNKPESDILVHTAYDESTDENVMLLTSDAPEYKPWALVIQDSNGENKIKMLSGGSKRTADGSEFEPKKKRKV

SEQ ID NO: 57 - DNA, 3699 bp, Artificial Sequence
  63-12-AID
atggactataaggaccacgacggagactacaaggatcatgatattgattacaaagacgatgacgataagatggccccaaagaagaagcggaaggtcggtatccacggagtcccagcagccgtagatttgagaactttgggatattcacagcagcagcaggaaaagatcaagcccaaagtgaggtcgacagtcgcgcagcatcacgaagcgctggtgggtcatgggtttacacatgcccacatcgtagccttgtcgcagcaccctgcagcccttggcacggtcgccgtcaagtaccaggacatgattgcggcgttgccggaagccacacatgaggcgatcgtcggtgtggggaaacagtggagcggagcccgagcgcttgaggccctgttgacggtcgcgggagagctgagagggcctccccttcagctggacacgggccagttgctgaagatcgcgaagcggggaggagtcacggcggtcgaggcggtacacgcgtggcgcaatgcgctcacgggagcacccctcaacctgaccccagaccaggttgtggccatcgccagcaacataggtggcaagcaggccctcgaaaccgtccagagactgttaccggttctctgccaggaccacggcctgaccccggaacaggtggttgcaatcgcgtcacacgatgggggaaagcaggccctagaaaccgttcagcgactcctgcccgtcctgtgccaggcccacggcctgaccccagaccaggttgtggccatcgccagcaacataggtggcaagcaggccctcgaaaccgtccagagactgttaccggttctctgccaggcccacggcctgaccccagcccaagttgtcgcgattgcaagcaacaacggaggcaaacaagccttagaaacagtccagagattgttgccggtgctgtgccaagaccacggcctgaccccagaccaggttgtggccatcgccagcaacataggtggcaagcaggccctcgaaaccgtccagagactgttaccggttctctgccaggaccacggcctgaccccagaacaggttgtggccatcgccagcaacataggtggcaagcaggccctcgaaaccgtccagagactgttaccggttctctgccaggcccacggcctgaccccagaccaagttgtcgcgattgcaagcaacaacggaggcaaacaagccttagaaacagtccagagattgttgcctgtgctgtgccaagcccacggcctgaccccggcccaggtggttgcaatcgcgtcacacgatgggggaaagcaggccctagaaaccgttcagcgactcctgcccgtcctgtgccaggaccacggcctgaccccagaccaagttgtcgcgattgcaagcaacaacggaggcaaacaagccttagaaacagtccagagattgttgccggtgctgtgccaagaccacggcctgaccccagaacaagttgtcgcgattgcaagcaacaacggaggcaaacaagccttagaaacagtccagagattgttgccggtgctgtgccaagcccacggcctgaccccagaccaagttgtcgcgattgcaagcaacaacggaggcaaacaagccttagaaacagtccagagattgttgcctgtgctgtgccaagcccacggcctgaccccggcccaggtggttgcaatcgcgtcacacgatgggggaaagcaggccctagaaaccgttcagcgactcctgcccgtcctgtgccaggaccacggcctgaccccagaccaggttgtggccatcgccagcaacataggtggcaagcaggccctcgaaaccgtccagagactgttaccggttctctgccaggaccacggcctgaccccagaacaggttgtggccatcgccagcaacataggtggcaagcaggccctcgaaaccgtccagagactgttaccggttctctgccaggcccacggcctgaccccagaccaggttgtggccatcgccagcaacataggtggcaagcaggccctcgaaaccgtccagagactgttaccggttctctgccaggcccacggcctgaccccagcccaagttgtcgcgattgcaagcaacaacggaggcaaacaagccttagaaacagtccagagattgttgccggtgctgtgccaagaccacggcctgacccctgagcaggtagtggctattgcatccaacaacgggggcagacccgcactggagtcaatcgtggcccagctttcgaggccggaccccgcgctggccgcactcactaatgatcatcttgtagcgctggcctgcctcggcggacgacccgccttggatgcggtgaagaaggggctcccgcacgcgcctgcattgattaagcggaccaacagaaggatccccgagaggacatcacatcgagtggcaggttccgctagccccaagaagaagagaaaggtggaggccagcatgaccgacgccgagtatgtgcggatccacgagaagctggatatctacaccttcaagaagcagttctttaacaataagaagtccgtgtctcacagatgctatgtgctgttcgagctgaagcggagaggagagaggcgcgcatgtttttggggctacgccgtgaataagccacagagcggaaccgagaggggaatccacgccgagatcttctccatcaggaaagtggaggagtatctgcgcgacaaccctggccagtttacaatcaattggtacagctcctggagcccatgcgccgattgtgccgagaagatcctggagtggtataaccaggagctgagaggcaatggccacaccctgaagatctgggcctgcaagctgtactatgagaagaacgcccggaatcagatcggcctgtggaacctgagagacaatggcgtgggcctgaacgtgatggtgtctgagcactaccagtgctgtaggaagatcttcatccagtctagccacaatcagctgaacgagaatcgctggctggagaagacactgaagagggccgagaagtggcgcagcgagctgtccatcatgatccaggtgaagatcctgcacaccacaaagagcccagcagtgggatccggaggatctggaggaagcggaggatccaccaacctgtctgacatcatcgagaaggagacaggcaagcagctggtcatccaggagagcatcctgatgctgcccgaggaggtggaggaagtgatcggcaacaagcctgagtccgatatcctggtgcacaccgcctacgacgagtccacagatgagaatgtgatgctgctgacctctgacgccccagagtataagccctgggccctggtcatccaggatagcaacggcgagaataagatcaagatgctgtccggcggaagcggaggatccggaggctctaccaatctgtccgatattattgaaaaagagacaggcaagcaactggtcatccaggagtctatcctgatgctgccagaagaagtcgaagaagtgatcggaaacaagcccgaaagcgacatcctggtccatactgcctacgacgagagtaccgacgaaaatgtgatgttactgacctccgacgcccctgagtataagccatgggctctggtcatccaggactccaatggagaaaataagatcaagatgttaagcggcggctccaagagaacagccgacggctccgagttcgagcccaagaagaagcggaaagtg

SEQ ID NO: 58 - protein, 1233 aa, Artificial Sequence
  63-12-AID
MDYKDHDGDYKDHDIDYKDDDDKMAPKKKRKVGIHGVPAAVDLRTLGYSQQQQEKIKPKVRSTVAQHHEALVGHGFTHAHIVALSQHPAALGTVAVKYQDMIAALPEATHEAIVGVGKQWSGARALEALLTVAGELRGPPLQLDTGQLLKIAKRGGVTAVEAVHAWRNALTGAPLNLTPDQVVAIASNIGGKQALETVQRLLPVLCQDHGLTPEQVVAIASHDGGKQALETVQRLLPVLCQAHGLTPDQVVAIASNIGGKQALETVQRLLPVLCQAHGLTPAQVVAIASNNGGKQALETVQRLLPVLCQDHGLTPDQVVAIASNIGGKQALETVQRLLPVLCQDHGLTPEQVVAIASNIGGKQALETVQRLLPVLCQAHGLTPDQVVAIASNNGGKQALETVQRLLPVLCQAHGLTPAQVVAIASHDGGKQALETVQRLLPVLCQDHGLTPDQVVAIASNNGGKQALETVQRLLPVLCQDHGLTPEQVVAIASNNGGKQALETVQRLLPVLCQAHGLTPDQVVAIASNNGGKQALETVQRLLPVLCQAHGLTPAQVVAIASHDGGKQALETVQRLLPVLCQDHGLTPDQVVAIASNIGGKQALETVQRLLPVLCQDHGLTPEQVVAIASNIGGKQALETVQRLLPVLCQAHGLTPDQVVAIASNIGGKQALETVQRLLPVLCQAHGLTPAQVVAIASNNGGKQALETVQRLLPVLCQDHGLTPEQVVAIASNNGGRPALESIVAQLSRPDPALAALTNDHLVALACLGGRPALDAVKKGLPHAPALIKRTNRRIPERTSHRVAGSASPKKKRKVEASMTDAEYVRIHEKLDIYTFKKQFFNNKKSVSHRCYVLFELKRRGERRACFWGYAVNKPQSGTERGIHAEIFSIRKVEEYLRDNPGQFTINWYSSWSPCADCAEKILEWYNQELRGNGHTLKIWACKLYYEKNARNQIGLWNLRDNGVGLNVMVSEHYQCCRKIFIQSSHNQLNENRWLEKTLKRAEKWRSELSIMIQVKILHTTKSPAVGSGGSGGSGGSTNLSDIIEKETGKQLVIQESILMLPEEVEEVIGNKPESDILVHTAYDESTDENVMLLTSDAPEYKPWALVIQDSNGENKIKMLSGGSGGSGGSTNLSDIIEKETGKQLVIQESILMLPEEVEEVIGNKPESDILVHTAYDESTDENVMLLTSDAPEYKPWALVIQDSNGENKIKMLSGGSKRTADGSEFEPKKKRKV

SEQ ID NO: 59 - DNA, 3699 bp, Artificial Sequence
  63-12-AID-NC
atggactataaggaccacgacggagactacaaggatcatgatattgattacaaagacgatgacgataagatggccccaaagaagaagcggaaggtcggtatccacggagtcccagcagccgtagatttgagaactttgggatattcacagcagcagcaggaaaagatcaagcccaaagtgaggtcgacagtcgcgcagcatcacgaagcgctggtgggtcatgggtttacacatgcccacatcgtagccttgtcgcagcaccctgcagcccttggcacggtcgccgtcaagtaccaggacatgattgcggcgttgccggaagccacacatgaggcgatcgtcggtgtggggaaacagtggagcggagcccgagcgcttgaggccctgttgacggtcgcgggagagctgagagggcctccccttcagctggacacgggccagttgctgaagatcgcgaagcggggaggagtcacggcggtcgaggcggtacacgcgtggcgcaatgcgctcacgggagcacccctcaacctgacccccgaccaggttgtcgctattgctagtaacggcggaggcaaacaggcgctggaaacagttcagcgcctcttgccggtcttgtgtcaggaccacggcctgaccccagaacaagttgtcgcgattgcaagcaacaacggaggcaaacaagccttagaaacagtccagagattgttgccggtgctgtgccaagcccacggcctgaccccggaccaggtggttgcaatcgcgtcacacgatgggggaaagcaggccctagaaaccgttcagcgactcctgcccgtcctgtgccaggcccacggcctgaccccagcccaagttgtcgcgattgcaagcaacaacggaggcaaacaagccttagaaacagtccagagattgttgccggtgctgtgccaagaccacggcctgaccccggaccaggtggttgcaatcgcgtcacacgatgggggaaagcaggccctagaaaccgttcagcgactcctgcccgtcctgtgccaggaccacggcctgaccccagaacaagttgtcgcgattgcaagcaacaacggaggcaaacaagccttagaaacagtccagagattgttgccggtgctgtgccaagcccacggcctgacccccgaccaggttgtcgctattgctagtaacggcggaggcaaacaggcgctggaaacagttcagcgcctcttgccggtcttgtgtcaggcccacggcctgaccccagcccaggttgtggccatcgccagcaacataggtggcaagcaggccctcgaaaccgtccagagactgttaccggttctctgccaggaccacggcctgacccccgaccaggttgtcgctattgctagtaacggcggaggcaaacaggcgctggaaacagttcagcgcctcttgccggtcttgtgtcaggaccacggcctgaccccagaacaggttgtggccatcgccagcaacataggtggcaagcaggccctcgaaaccgtccagagactgttaccggttctctgccaggcccacggcctgaccccagaccaagttgtcgcgattgcaagcaacaacggaggcaaacaagccttagaaacagtccagagattgttgcctgtgctgtgccaagcccacggcctgacccccgcccaggttgtcgctattgctagtaacggcggaggcaaacaggcgctggaaacagttcagcgcctcttgccggtcttgtgtcaggaccacggcctgaccccggaccaggtggttgcaatcgcgtcacacgatgggggaaagcaggccctagaaaccgttcagcgactcctgcccgtcctgtgccaggaccacggcctgaccccagaacaagttgtcgcgattgcaagcaacaacggaggcaaacaagccttagaaacagtccagagattgttgccggtgctgtgccaagcccacggcctgaccccggaccaggtggttgcaatcgcgtcacacgatgggggaaagcaggccctagaaaccgttcagcgactcctgcccgtcctgtgccaggcccacggcctgaccccagcccaagttgtcgcgattgcaagcaacaacggaggcaaacaagccttagaaacagtccagagattgttgccggtgctgtgccaagaccacggcctgacccctgagcaggtagtggctattgcatccaacaacgggggcagacccgcactggagtcaatcgtggcccagctttcgaggccggaccccgcgctggccgcactcactaatgatcatcttgtagcgctggcctgcctcggcggacgacccgccttggatgcggtgaagaaggggctcccgcacgcgcctgcattgattaagcggaccaacagaaggatccccgagaggacatcacatcgagtggcaggttccgctagccccaagaagaagagaaaggtggaggccagcatgaccgacgccgagtatgtgcggatccacgagaagctggatatctacaccttcaagaagcagttctttaacaataagaagtccgtgtctcacagatgctatgtgctgttcgagctgaagcggagaggagagaggcgcgcatgtttttggggctacgccgtgaataagccacagagcggaaccgagaggggaatccacgccgagatcttctccatcaggaaagtggaggagtatctgcgcgacaaccctggccagtttacaatcaattggtacagctcctggagcccatgcgccgattgtgccgagaagatcctggagtggtataaccaggagctgagaggcaatggccacaccctgaagatctgggcctgcaagctgtactatgagaagaacgcccggaatcagatcggcctgtggaacctgagagacaatggcgtgggcctgaacgtgatggtgtctgagcactaccagtgctgtaggaagatcttcatccagtctagccacaatcagctgaacgagaatcgctggctggagaagacactgaagagggccgagaagtggcgcagcgagctgtccatcatgatccaggtgaagatcctgcacaccacaaagagcccagcagtgggatccggaggatctggaggaagcggaggatccaccaacctgtctgacatcatcgagaaggagacaggcaagcagctggtcatccaggagagcatcctgatgctgcccgaggaggtggaggaagtgatcggcaacaagcctgagtccgatatcctggtgcacaccgcctacgacgagtccacagatgagaatgtgatgctgctgacctctgacgccccagagtataagccctgggccctggtcatccaggatagcaacggcgagaataagatcaagatgctgtccggcggaagcggaggatccggaggctctaccaatctgtccgatattattgaaaaagagacaggcaagcaactggtcatccaggagtctatcctgatgctgccagaagaagtcgaagaagtgatcggaaacaagcccgaaagcgacatcctggtccatactgcctacgacgagagtaccgacgaaaatgtgatgttactgacctccgacgcccctgagtataagccatgggctctggtcatccaggactccaatggagaaaataagatcaagatgttaagcggcggctccaagagaacagccgacggctccgagttcgagcccaagaagaagcggaaagtg

SEQ ID NO: 60 - protein, 1233 aa, Artificial Sequence
  63-12-AID-NC
MDYKDHDGDYKDHDIDYKDDDDKMAPKKKRKVGIHGVPAAVDLRTLGYSQQQQEKIKPKVRSTVAQHHEALVGHGFTHAHIVALSQHPAALGTVAVKYQDMIAALPEATHEAIVGVGKQWSGARALEALLTVAGELRGPPLQLDTGQLLKIAKRGGVTAVEAVHAWRNALTGAPLNLTPDQVVAIASNGGGKQALETVQRLLPVLCQDHGLTPEQVVAIASNNGGKQALETVQRLLPVLCQAHGLTPDQVVAIASHDGGKQALETVQRLLPVLCQAHGLTPAQVVAIASNNGGKQALETVQRLLPVLCQDHGLTPDQVVAIASHDGGKQALETVQRLLPVLCQDHGLTPEQVVAIASNNGGKQALETVQRLLPVLCQAHGLTPDQVVAIASNGGGKQALETVQRLLPVLCQAHGLTPAQVVAIASNIGGKQALETVQRLLPVLCQDHGLTPDQVVAIASNGGGKQALETVQRLLPVLCQDHGLTPEQVVAIASNIGGKQALETVQRLLPVLCQAHGLTPDQVVAIASNNGGKQALETVQRLLPVLCQAHGLTPAQVVAIASNGGGKQALETVQRLLPVLCQDHGLTPDQVVAIASHDGGKQALETVQRLLPVLCQDHGLTPEQVVAIASNNGGKQALETVQRLLPVLCQAHGLTPDQVVAIASHDGGKQALETVQRLLPVLCQAHGLTPAQVVAIASNNGGKQALETVQRLLPVLCQDHGLTPEQVVAIASNNGGRPALESIVAQLSRPDPALAALTNDHLVALACLGGRPALDAVKKGLPHAPALIKRTNRRIPERTSHRVAGSASPKKKRKVEASMTDAEYVRIHEKLDIYTFKKQFFNNKKSVSHRCYVLFELKRRGERRACFWGYAVNKPQSGTERGIHAEIFSIRKVEEYLRDNPGQFTINWYSSWSPCADCAEKILEWYNQELRGNGHTLKIWACKLYYEKNARNQIGLWNLRDNGVGLNVMVSEHYQCCRKIFIQSSHNQLNENRWLEKTLKRAEKWRSELSIMIQVKILHTTKSPAVGSGGSGGSGGSTNLSDIIEKETGKQLVIQESILMLPEEVEEVIGNKPESDILVHTAYDESTDENVMLLTSDAPEYKPWALVIQDSNGENKIKMLSGGSGGSGGSTNLSDIIEKETGKQLVIQESILMLPEEVEEVIGNKPESDILVHTAYDESTDENVMLLTSDAPEYKPWALVIQDSNGENKIKMLSGGSKRTADGSEFEPKKKRKV

SEQ ID NO: 61 - DNA, 3690 bp, Artificial Sequence
  47-12-AID
atggcttcctcccctccaaagaaaaagagaaaggttgcggccgctgactacaaggatgacgacgataaaagttggaaggacgcaagtggttggtctagaatgcatgcggccccgcgacggcgtgctgcgcaaccctccgacgcttcgccggccgcgcaggtggatctacgcacgctcggctacagtcagcagcagcaagagaagatcaaaccgaaggtgcgttcgacagtggcgcagcaccacgaggcactggtgggccatgggtttacacacgcgcacatcgttgcgctcagccaacacccggcagcgttagggaccgtcgctgtcacgtatcagcacataatcacggcgttgccagaggcgacacacgaagacatcgttggcgtcggcaaacagtggtccggcgcacgcgccctggaggccttgctcacggatgcgggggagttgagaggtccgccgttacagttggacacaggccaacttgtgaagattgcaaaacgtggcggcgtgaccgcaatggaggcagtgcatgcatcgcgcaatgcgctcacgggagcacccctcaacctgaccccagaccaggttgtggccatcgccagcaacataggtggcaagcaggccctcgaaaccgtccagagactgttaccggttctctgccaggaccacggcctgaccccggaacaggtggttgcaatcgcgtcacacgatgggggaaagcaggccctagaaaccgttcagcgactcctgcccgtcctgtgccaggcccacggcctgaccccagaccaggttgtggccatcgccagcaacataggtggcaagcaggccctcgaaaccgtccagagactgttaccggttctctgccaggcccacggcctgaccccagcccaagttgtcgcgattgcaagcaacaacggaggcaaacaagccttagaaacagtccagagattgttgccggtgctgtgccaagaccacggcctgaccccagaccaggttgtggccatcgccagcaacataggtggcaagcaggccctcgaaaccgtccagagactgttaccggttctctgccaggaccacggcctgaccccagaacaggttgtggccatcgccagcaacataggtggcaagcaggccctcgaaaccgtccagagactgttaccggttctctgccaggcccacggcctgaccccagaccaagttgtcgcgattgcaagcaacaacggaggcaaacaagccttagaaacagtccagagattgttgcctgtgctgtgccaagcccacggcctgaccccggcccaggtggttgcaatcgcgtcacacgatgggggaaagcaggccctagaaaccgttcagcgactcctgcccgtcctgtgccaggaccacggcctgaccccagaccaagttgtcgcgattgcaagcaacaacggaggcaaacaagccttagaaacagtccagagattgttgccggtgctgtgccaagaccacggcctgaccccagaacaagttgtcgcgattgcaagcaacaacggaggcaaacaagccttagaaacagtccagagattgttgccggtgctgtgccaagcccacggcctgaccccagaccaagttgtcgcgattgcaagcaacaacggaggcaaacaagccttagaaacagtccagagattgttgcctgtgctgtgccaagcccacggcctgaccccggcccaggtggttgcaatcgcgtcacacgatgggggaaagcaggccctagaaaccgttcagcgactcctgcccgtcctgtgccaggaccacggcctgaccccagaccaggttgtggccatcgccagcaacataggtggcaagcaggccctcgaaaccgtccagagactgttaccggttctctgccaggaccacggcctgaccccagaacaggttgtggccatcgccagcaacataggtggcaagcaggccctcgaaaccgtccagagactgttaccggttctctgccaggcccacggcctgaccccagaccaggttgtggccatcgccagcaacataggtggcaagcaggccctcgaaaccgtccagagactgttaccggttctctgccaggcccacggcctgaccccagcccaagttgtcgcgattgcaagcaacaacggaggcaaacaagccttagaaacagtccagagattgttgccggtgctgtgccaagaccacggcctgacccctgagcaggtagtggctattgcatccaacaacgggggcagacccgcactggagtcaatcgtggcccagctttcgaggccggaccccgcgctggccgcactcactaatgatcatcttgtagcgctggcctgcctcggcggacgtcctgccatggatgcagtgaaaaagggattgccgcacgcgccggaattgatcagatccgctagccccaagaagaagagaaaggtggaggccagcatgaccgacgccgagtatgtgcggatccacgagaagctggatatctacaccttcaagaagcagttctttaacaataagaagtccgtgtctcacagatgctatgtgctgttcgagctgaagcggagaggagagaggcgcgcatgtttttggggctacgccgtgaataagccacagagcggaaccgagaggggaatccacgccgagatcttctccatcaggaaagtggaggagtatctgcgcgacaaccctggccagtttacaatcaattggtacagctcctggagcccatgcgccgattgtgccgagaagatcctggagtggtataaccaggagctgagaggcaatggccacaccctgaagatctgggcctgcaagctgtactatgagaagaacgcccggaatcagatcggcctgtggaacctgagagacaatggcgtgggcctgaacgtgatggtgtctgagcactaccagtgctgtaggaagatcttcatccagtctagccacaatcagctgaacgagaatcgctggctggagaagacactgaagagggccgagaagtggcgcagcgagctgtccatcatgatccaggtgaagatcctgcacaccacaaagagcccagcagtgggatccggaggatctggaggaagcggaggatccaccaacctgtctgacatcatcgagaaggagacaggcaagcagctggtcatccaggagagcatcctgatgctgcccgaggaggtggaggaagtgatcggcaacaagcctgagtccgatatcctggtgcacaccgcctacgacgagtccacagatgagaatgtgatgctgctgacctctgacgccccagagtataagccctgggccctggtcatccaggatagcaacggcgagaataagatcaagatgctgtccggcggaagcggaggatccggaggctctaccaatctgtccgatattattgaaaaagagacaggcaagcaactggtcatccaggagtctatcctgatgctgccagaagaagtcgaagaagtgatcggaaacaagcccgaaagcgacatcctggtccatactgcctacgacgagagtaccgacgaaaatgtgatgttactgacctccgacgcccctgagtataagccatgggctctggtcatccaggactccaatggagaaaataagatcaagatgttaagcggcggctccaagagaacagccgacggctccgagttcgagcccaagaagaagcggaaagtg

SEQ ID NO: 62 - protein, 1230 aa, Artificial Sequence
  47-12-AID
MASSPPKKKRKVAAADYKDDDDKSWKDASGWSRMHAAPRRRAAQPSDASPAAQVDLRTLGYSQQQQEKIKPKVRSTVAQHHEALVGHGFTHAHIVALSQHPAALGTVAVTYQHIITALPEATHEDIVGVGKQWSGARALEALLTDAGELRGPPLQLDTGQLVKIAKRGGVTAMEAVHASRNALTGAPLNLTPDQVVAIASNIGGKQALETVQRLLPVLCQDHGLTPEQVVAIASHDGGKQALETVQRLLPVLCQAHGLTPDQVVAIASNIGGKQALETVQRLLPVLCQAHGLTPAQVVAIASNNGGKQALETVQRLLPVLCQDHGLTPDQVVAIASNIGGKQALETVQRLLPVLCQDHGLTPEQVVAIASNIGGKQALETVQRLLPVLCQAHGLTPDQVVAIASNNGGKQALETVQRLLPVLCQAHGLTPAQVVAIASHDGGKQALETVQRLLPVLCQDHGLTPDQVVAIASNNGGKQALETVQRLLPVLCQDHGLTPEQVVAIASNNGGKQALETVQRLLPVLCQAHGLTPDQVVAIASNNGGKQALETVQRLLPVLCQAHGLTPAQVVAIASHDGGKQALETVQRLLPVLCQDHGLTPDQVVAIASNIGGKQALETVQRLLPVLCQDHGLTPEQVVAIASNIGGKQALETVQRLLPVLCQAHGLTPDQVVAIASNIGGKQALETVQRLLPVLCQAHGLTPAQVVAIASNNGGKQALETVQRLLPVLCQDHGLTPEQVVAIASNNGGRPALESIVAQLSRPDPALAALTNDHLVALACLGGRPAMDAVKKGLPHAPELIRSASPKKKRKVEASMTDAEYVRIHEKLDIYTFKKQFFNNKKSVSHRCYVLFELKRRGERRACFWGYAVNKPQSGTERGIHAEIFSIRKVEEYLRDNPGQFTINWYSSWSPCADCAEKILEWYNQELRGNGHTLKIWACKLYYEKNARNQIGLWNLRDNGVGLNVMVSEHYQCCRKIFIQSSHNQLNENRWLEKTLKRAEKWRSELSIMIQVKILHTTKSPAVGSGGSGGSGGSTNLSDIIEKETGKQLVIQESILMLPEEVEEVIGNKPESDILVHTAYDESTDENVMLLTSDAPEYKPWALVIQDSNGENKIKMLSGGSGGSGGSTNLSDIIEKETGKQLVIQESILMLPEEVEEVIGNKPESDILVHTAYDESTDENVMLLTSDAPEYKPWALVIQDSNGENKIKMLSGGSKRTADGSEFEPKKKRKV

SEQ ID NO: 63 - DNA, 3690 bp, Artificial Sequence
  47-12-AID-NC
atggcttcctcccctccaaagaaaaagagaaaggttgcggccgctgactacaaggatgacgacgataaaagttggaaggacgcaagtggttggtctagaatgcatgcggccccgcgacggcgtgctgcgcaaccctccgacgcttcgccggccgcgcaggtggatctacgcacgctcggctacagtcagcagcagcaagagaagatcaaaccgaaggtgcgttcgacagtggcgcagcaccacgaggcactggtgggccatgggtttacacacgcgcacatcgttgcgctcagccaacacccggcagcgttagggaccgtcgctgtcacgtatcagcacataatcacggcgttgccagaggcgacacacgaagacatcgttggcgtcggcaaacagtggtccggcgcacgcgccctggaggccttgctcacggatgcgggggagttgagaggtccgccgttacagttggacacaggccaacttgtgaagattgcaaaacgtggcggcgtgaccgcaatggaggcagtgcatgcatcgcgcaatgcgctcacgggagcacccctcaacctgacccccgaccaggttgtcgctattgctagtaacggcggaggcaaacaggcgctggaaacagttcagcgcctcttgccggtcttgtgtcaggaccacggcctgaccccagaacaagttgtcgcgattgcaagcaacaacggaggcaaacaagccttagaaacagtccagagattgttgccggtgctgtgccaagcccacggcctgaccccggaccaggtggttgcaatcgcgtcacacgatgggggaaagcaggccctagaaaccgttcagcgactcctgcccgtcctgtgccaggcccacggcctgaccccagcccaagttgtcgcgattgcaagcaacaacggaggcaaacaagccttagaaacagtccagagattgttgccggtgctgtgccaagaccacggcctgaccccggaccaggtggttgcaatcgcgtcacacgatgggggaaagcaggccctagaaaccgttcagcgactcctgcccgtcctgtgccaggaccacggcctgaccccagaacaagttgtcgcgattgcaagcaacaacggaggcaaacaagccttagaaacagtccagagattgttgccggtgctgtgccaagcccacggcctgacccccgaccaggttgtcgctattgctagtaacggcggaggcaaacaggcgctggaaacagttcagcgcctcttgccggtcttgtgtcaggcccacggcctgaccccagcccaggttgtggccatcgccagcaacataggtggcaagcaggccctcgaaaccgtccagagactgttaccggttctctgccaggaccacggcctgacccccgaccaggttgtcgctattgctagtaacggcggaggcaaacaggcgctggaaacagttcagcgcctcttgccggtcttgtgtcaggaccacggcctgaccccagaacaggttgtggccatcgccagcaacataggtggcaagcaggccctcgaaaccgtccagagactgttaccggttctctgccaggcccacggcctgaccccagaccaagttgtcgcgattgcaagcaacaacggaggcaaacaagccttagaaacagtccagagattgttgcctgtgctgtgccaagcccacggcctgacccccgcccaggttgtcgctattgctagtaacggcggaggcaaacaggcgctggaaacagttcagcgcctcttgccggtcttgtgtcaggaccacggcctgaccccggaccaggtggttgcaatcgcgtcacacgatgggggaaagcaggccctagaaaccgttcagcgactcctgcccgtcctgtgccaggaccacggcctgaccccagaacaagttgtcgcgattgcaagcaacaacggaggcaaacaagccttagaaacagtccagagattgttgccggtgctgtgccaagcccacggcctgaccccggaccaggtggttgcaatcgcgtcacacgatgggggaaagcaggccctagaaaccgttcagcgactcctgcccgtcctgtgccaggcccacggcctgaccccagcccaagttgtcgcgattgcaagcaacaacggaggcaaacaagccttagaaacagtccagagattgttgccggtgctgtgccaagaccacggcctgacccctgagcaggtagtggctattgcatccaacaacgggggcagacccgcactggagtcaatcgtggcccagctttcgaggccggaccccgcgctggccgcactcactaatgatcatcttgtagcgctggcctgcctcggcggacgtcctgccatggatgcagtgaaaaagggattgccgcacgcgccggaattgatcagatccgctagccccaagaagaagagaaaggtggaggccagcatgaccgacgccgagtatgtgcggatccacgagaagctggatatctacaccttcaagaagcagttctttaacaataagaagtccgtgtctcacagatgctatgtgctgttcgagctgaagcggagaggagagaggcgcgcatgtttttggggctacgccgtgaataagccacagagcggaaccgagaggggaatccacgccgagatcttctccatcaggaaagtggaggagtatctgcgcgacaaccctggccagtttacaatcaattggtacagctcctggagcccatgcgccgattgtgccgagaagatcctggagtggtataaccaggagctgagaggcaatggccacaccctgaagatctgggcctgcaagctgtactatgagaagaacgcccggaatcagatcggcctgtggaacctgagagacaatggcgtgggcctgaacgtgatggtgtctgagcactaccagtgctgtaggaagatcttcatccagtctagccacaatcagctgaacgagaatcgctggctggagaagacactgaagagggccgagaagtggcgcagcgagctgtccatcatgatccaggtgaagatcctgcacaccacaaagagcccagcagtgggatccggaggatctggaggaagcggaggatccaccaacctgtctgacatcatcgagaaggagacaggcaagcagctggtcatccaggagagcatcctgatgctgcccgaggaggtggaggaagtgatcggcaacaagcctgagtccgatatcctggtgcacaccgcctacgacgagtccacagatgagaatgtgatgctgctgacctctgacgccccagagtataagccctgggccctggtcatccaggatagcaacggcgagaataagatcaagatgctgtccggcggaagcggaggatccggaggctctaccaatctgtccgatattattgaaaaagagacaggcaagcaactggtcatccaggagtctatcctgatgctgccagaagaagtcgaagaagtgatcggaaacaagcccgaaagcgacatcctggtccatactgcctacgacgagagtaccgacgaaaatgtgatgttactgacctccgacgcccctgagtataagccatgggctctggtcatccaggactccaatggagaaaataagatcaagatgttaagcggcggctccaagagaacagccgacggctccgagttcgagcccaagaagaagcggaaagtg

SEQ ID NO: 64 - protein, 1230 aa, Artificial Sequence
  47-12-AID-NC
MASSPPKKKRKVAAADYKDDDDKSWKDASGWSRMHAAPRRRAAQPSDASPAAQVDLRTLGYSQQQQEKIKPKVRSTVAQHHEALVGHGFTHAHIVALSQHPAALGTVAVTYQHIITALPEATHEDIVGVGKQWSGARALEALLTDAGELRGPPLQLDTGQLVKIAKRGGVTAMEAVHASRNALTGAPLNLTPDQVVAIASNGGGKQALETVQRLLPVLCQDHGLTPEQVVAIASNNGGKQALETVQRLLPVLCQAHGLTPDQVVAIASHDGGKQALETVQRLLPVLCQAHGLTPAQVVAIASNNGGKQALETVQRLLPVLCQDHGLTPDQVVAIASHDGGKQALETVQRLLPVLCQDHGLTPEQVVAIASNNGGKQALETVQRLLPVLCQAHGLTPDQVVAIASNGGGKQALETVQRLLPVLCQAHGLTPAQVVAIASNIGGKQALETVQRLLPVLCQDHGLTPDQVVAIASNGGGKQALETVQRLLPVLCQDHGLTPEQVVAIASNIGGKQALETVQRLLPVLCQAHGLTPDQVVAIASNNGGKQALETVQRLLPVLCQAHGLTPAQVVAIASNGGGKQALETVQRLLPVLCQDHGLTPDQVVAIASHDGGKQALETVQRLLPVLCQDHGLTPEQVVAIASNNGGKQALETVQRLLPVLCQAHGLTPDQVVAIASHDGGKQALETVQRLLPVLCQAHGLTPAQVVAIASNNGGKQALETVQRLLPVLCQDHGLTPEQVVAIASNNGGRPALESIVAQLSRPDPALAALTNDHLVALACLGGRPAMDAVKKGLPHAPELIRSASPKKKRKVEASMTDAEYVRIHEKLDIYTFKKQFFNNKKSVSHRCYVLFELKRRGERRACFWGYAVNKPQSGTERGIHAEIFSIRKVEEYLRDNPGQFTINWYSSWSPCADCAEKILEWYNQELRGNGHTLKIWACKLYYEKNARNQIGLWNLRDNGVGLNVMVSEHYQCCRKIFIQSSHNQLNENRWLEKTLKRAEKWRSELSIMIQVKILHTTKSPAVGSGGSGGSGGSTNLSDIIEKETGKQLVIQESILMLPEEVEEVIGNKPESDILVHTAYDESTDENVMLLTSDAPEYKPWALVIQDSNGENKIKMLSGGSGGSGGSTNLSDIIEKETGKQLVIQESILMLPEEVEEVIGNKPESDILVHTAYDESTDENVMLLTSDAPEYKPWALVIQDSNGENKIKMLSGGSKRTADGSEFEPKKKRKV

SEQ ID NO: 65 - DNA, 23 bp, Artificial Sequence
  PAM1
ggaagacggatatctcctgcagg

SEQ ID NO: 66 - DNA, 23 bp, Artificial Sequence
  PAM2
gaagacggatatctcctgcaggg

SEQ ID NO: 67 - DNA, 23 bp, Artificial Sequence
  PAM3
aagacggatatctcctgcagggg

SEQ ID NO: 68 - DNA, 23 bp, Artificial Sequence
  PAM4
agacggatatctcctgcaggggg

SEQ ID NO: 69 - DNA, 23 bp, Artificial Sequence
  PAM5
gacggatatctcctgcagggggg

SEQ ID NO: 70 - DNA, 23 bp, Artificial Sequence
  PAM6
acggatatctcctgcaggggggg

SEQ ID NO: 71 - DNA, 23 bp, Artificial Sequence
  PAM7
cggatatctcctgcagggggggg

SEQ ID NO: 72 - DNA, 23 bp, Artificial Sequence
  PAM8
ggatatctcctgcaggggggggg

SEQ ID NO: 73 - DNA, 41 bp, Artificial Sequence
  BE4_32aa+infTALEW
gtccttatagtccatggatcctccagaggagccgccgctag

SEQ ID NO: 74 - DNA, 41 bp, Artificial Sequence
  BE4_32aa+infTALE47
aggggaggaagccatggatcctccagaggagccgccgctag

SEQ ID NO: 75 - DNA, 41 bp, Artificial Sequence
  10aa_F+infWT
cgcgcgtcagccagctccggaggatctggaggaagcggagg

SEQ ID NO: 76 - DNA, 41 bp, Artificial Sequence
  10aa_F+inf63
cgagtggcaggttcctccggaggatctggaggaagcggagg

SEQ ID NO: 77 - DNA, 41 bp, Artificial Sequence
  10aa_F+inf47
gaattgatcagatcctccggaggatctggaggaagcggagg

SEQ ID NO: 78 - DNA, 27 bp, Artificial Sequence
  TALE_WT_F
atggactataaggaccacgacggagac

SEQ ID NO: 79 - DNA, 27 bp, Artificial Sequence
  TALE_47_F
atggcttcctcccctccaaagaaaaag

SEQ ID NO: 80 - DNA, 34 bp, Artificial Sequence
  BE4_32aa+inf95aa5'-2
ccgcttcccacccgggtgtaggatcctccagagg

SEQ ID NO: 81 - DNA, 34 bp, Artificial Sequence
  TALEWT_F+inf95aa3'-2
ggatctagcatgaccgcggtcatggactataagg

SEQ ID NO: 82 - DNA, 35 bp, Artificial Sequence
  TALE47_F+inf95aa3'-2
ggatctagcatgaccgcggtcatggcttcctcccc

SEQ ID NO: 83 - DNA, 42 bp, Artificial Sequence
  5'NLS_R-infTadA
aaactccacctcagacaccttccgcttcttcttggggctctc

SEQ ID NO: 84 - DNA, 46 bp, Artificial Sequence
  ABE8e_F2
gttcaatgctcagaagaaggcccagagctccatcaactctggcggc

SEQ ID NO: 85 - DNA, 30 bp, Artificial Sequence
  TadA7.1_F
tctgaggtggagttttcccacgagtattgg

SEQ ID NO: 86 - DNA, 49 bp, Artificial Sequence
  ABE8e_R1
gctcctctttttgagttgcgccagccaaacaccacccttccgatcctgc

SEQ ID NO: 87 - DNA, 48 bp, Artificial Sequence
  ABE8e_F1
ctcaaaaagaggagcagcaggctccctgatgaacgtgctgaactaccc

SEQ ID NO: 88 - DNA, 48 bp, Artificial Sequence
  ABE8e_R2
ttctgagcattgaacacctgtctgggcatccgatagaaatcgcacagc

SEQ ID NO: 89 - DNA, 27 bp, Artificial Sequence
  SV40NLS_R
caccttccgcttcttcttggggctctc

SEQ ID NO: 90 - DNA, 27 bp, Artificial Sequence
  32aaLinker_F
tctggaggatcctctggaggaagctcc

SEQ ID NO: 91 - DNA, 42 bp, Artificial Sequence
  ABE8e_Rinf32aa
agaggatcctccagagttgatggagctctgggccttcttctg

SEQ ID NO: 92 - DNA, 44 bp, Artificial Sequence
  ABE8e_FinfNLS
aagaagcggaaggtgtctgaggtggagttttcccacgagtattg

SEQ ID NO: 93 - DNA, 4218 bp, Artificial Sequence
  BE4-32-WT
atgaagcgcaccgccgacggctctgagttcgagagccccaagaagaagcggaaggtgagctccgagacaggaccagtggcagtggaccctacactgcggagaaggatcgagcctcacgagtttgaggtgttctttgatccaagagagctgaggaaggagacatgcctgctgtacgagatcaagtggggcacatctcacaagatctggcgccactctagcaagaacaccacaaagcacgtggaagtgaatttcatcgagaagtttaccagcgagcggcacttctgccctagcacctcctgttctatcacatggtttctgagctggtccccatgcggcgagtgtagcaaggccatcaccgagttcctgtcccagcacccaaacgtgaccctggtcatctacgtggccaggctgtatcaccacatggaccagcagaacaggcagggcctgcgggatctggtgaattccggcgtgaccatccagatcatgacagcccccgagtacgattactgttggagaaacttcgtgaactacccacctggcaaggaggcacactggcctaggtacccacccctgtggatgaagctgtatgcactggagctgcacgcaggaatcctgggcctgcctccatgcctgaatatcctgcgccggaagcagccccagctgaccttctttacaatcgccctgcagagctgtcactaccagcggctgccacctcacatcctgtgggcaaccggcctgaagtctggaggatcctctggaggaagctccggaagcgagacaccaggcacatctgagagcgccacaccagagtctagcggcggctcctctggaggatccatggactataaggaccacgacggagactacaaggatcatgatattgattacaaagacgatgacgataagatggccccaaagaagaagcggaaggtcggtatccacggagtcccagcagccgtagatttgagaactttgggatattcacagcagcagcaggaaaagatcaagcccaaagtgaggtcgacagtcgcgcagcatcacgaagcgctggtgggtcatgggtttacacatgcccacatcgtagccttgtcgcagcaccctgcagcccttggcacggtcgccgtcaagtaccaggacatgattgcggcgttgccggaagccacacatgaggcgatcgtcggtgtggggaaacagtggagcggagcccgagcgcttgaggccctgttgacggtcgcgggagagctgagagggcctccccttcagctggacacgggccagttgctgaagatcgcgaagcggggaggagtcacggcggtcgaggcggtacacgcgtggcgcaatgcgctcacgggagcacccctcaacctgaccccagaccaggttgtggccatcgccagcaacataggtggcaagcaggccctcgaaaccgtccagagactgttaccggttctctgccaggaccacggcctgaccccggaacaggtggttgcaatcgcgtcacacgatgggggaaagcaggccctagaaaccgttcagcgactcctgcccgtcctgtgccaggcccacggcctgaccccagaccaggttgtggccatcgccagcaacataggtggcaagcaggccctcgaaaccgtccagagactgttaccggttctctgccaggcccacggcctgaccccagcccaagttgtcgcgattgcaagcaacaacggaggcaaacaagccttagaaacagtccagagattgttgccggtgctgtgccaagaccacggcctgaccccagaccaggttgtggccatcgccagcaacataggtggcaagcaggccctcgaaaccgtccagagactgttaccggttctctgccaggaccacggcctgaccccagaacaggttgtggccatcgccagcaacataggtggcaagcaggccctcgaaaccgtccagagactgttaccggttctctgccaggcccacggcctgaccccagaccaagttgtcgcgattgcaagcaacaacggaggcaaacaagccttagaaacagtccagagattgttgcctgtgctgtgccaagcccacggcctgaccccggcccaggtggttgcaatcgcgtcacacgatgggggaaagcaggccctagaaaccgttcagcgactcctgcccgtcctgtgccaggaccacggcctgaccccagaccaagttgtcgcgattgcaagcaacaacggaggcaaacaagccttagaaacagtccagagattgttgccggtgctgtgccaagaccacggcctgaccccagaacaagttgtcgcgattgcaagcaacaacggaggcaaacaagccttagaaacagtccagagattgttgccggtgctgtgccaagcccacggcctgaccccagaccaagttgtcgcgattgcaagcaacaacggaggcaaacaagccttagaaacagtccagagattgttgcctgtgctgtgccaagcccacggcctgaccccggcccaggtggttgcaatcgcgtcacacgatgggggaaagcaggccctagaaaccgttcagcgactcctgcccgtcctgtgccaggaccacggcctgaccccagaccaggttgtggccatcgccagcaacataggtggcaagcaggccctcgaaaccgtccagagactgttaccggttctctgccaggaccacggcctgaccccagaacaggttgtggccatcgccagcaacataggtggcaagcaggccctcgaaaccgtccagagactgttaccggttctctgccaggcccacggcctgaccccagaccaggttgtggccatcgccagcaacataggtggcaagcaggccctcgaaaccgtccagagactgttaccggttctctgccaggcccacggcctgaccccagcccaagttgtcgcgattgcaagcaacaacggaggcaaacaagccttagaaacagtccagagattgttgccggtgctgtgccaagaccacggcctgacccctgagcaggtagtggctattgcatccaacaacgggggcagacccgcactggagtcaatcgtggcccagctctcgaggccggaccccgcgctggccgcactcactaatgatcatcttgtagcgctggcctgcctcggcggacgacccgccttggatgcggtgaagaaggggctcccgcacgcgcctgcattgattaagcggaccaacagaaggatccccgagaggacatcacatcgagtggcagatcacgcgcaagtggtccgcgtgctcggattcttccagtgtcactcccaccccgcacaagcgttcgatgacgccatgactcaatttggtatgtcgagacacggactgctgcagctctttcgtagagtcggtgtcacagaactggaggcccgctcgggcacactgcctcccgcctcccagcggtgggacaggattctccaagcgagcggtatgaaacgcgcgaagccttcacctacgtcaactcagacacctgaccaggcgagccttcatgcgttcgcagactcgctggagagggatttggacgcgccctcgcccatgcatgaaggggaccaaactcgcgcgtcagccagctccggaggatctggaggaagcggaggatccaccaacctgtctgacatcatcgagaaggagacaggcaagcagctggtcatccaggagagcatcctgatgctgcccgaggaggtggaggaagtgatcggcaacaagcctgagtccgatatcctggtgcacaccgcctacgacgagtccacagatgagaatgtgatgctgctgacctctgacgccccagagtataagccctgggccctggtcatccaggatagcaacggcgagaataagatcaagatgctgtccggcggaagcggaggatccggaggctctaccaatctgtccgatattattgaaaaagagacaggcaagcaactggtcatccaggagtctatcctgatgctgccagaagaagtcgaagaagtgatcggaaacaagcccgaaagcgacatcctggtccatactgcctacgacgagagtaccgacgaaaatgtgatgttactgacctccgacgcccctgagtataagccatgggctctggtcatccaggactccaatggagaaaataagatcaagatgttaagcggcggctccaagagaacagccgacggctccgagttcgagcccaagaagaagcggaaagtg

SEQ ID NO: 94 - protein, 1406 aa, Artificial Sequence
  BE4-32-WT
MKRTADGSEFESPKKKRKVSSETGPVAVDPTLRRRIEPHEFEVFFDPRELRKETCLLYEIKWGTSHKIWRHSSKNTTKHVEVNFIEKFTSERHFCPSTSCSITWFLSWSPCGECSKAITEFLSQHPNVTLVIYVARLYHHMDQQNRQGLRDLVNSGVTIQIMTAPEYDYCWRNFVNYPPGKEAHWPRYPPLWMKLYALELHAGILGLPPCLNILRRKQPQLTFFTIALQSCHYQRLPPHILWATGLKSGGSSGGSSGSETPGTSESATPESSGGSSGGSMDYKDHDGDYKDHDIDYKDDDDKMAPKKKRKVGIHGVPAAVDLRTLGYSQQQQEKIKPKVRSTVAQHHEALVGHGFTHAHIVALSQHPAALGTVAVKYQDMIAALPEATHEAIVGVGKQWSGARALEALLTVAGELRGPPLQLDTGQLLKIAKRGGVTAVEAVHAWRNALTGAPLNLTPDQVVAIASNIGGKQALETVQRLLPVLCQDHGLTPEQVVAIASHDGGKQALETVQRLLPVLCQAHGLTPDQVVAIASNIGGKQALETVQRLLPVLCQAHGLTPAQVVAIASNNGGKQALETVQRLLPVLCQDHGLTPDQVVAIASNIGGKQALETVQRLLPVLCQDHGLTPEQVVAIASNIGGKQALETVQRLLPVLCQAHGLTPDQVVAIASNNGGKQALETVQRLLPVLCQAHGLTPAQVVAIASHDGGKQALETVQRLLPVLCQDHGLTPDQVVAIASNNGGKQALETVQRLLPVLCQDHGLTPEQVVAIASNNGGKQALETVQRLLPVLCQAHGLTPDQVVAIASNNGGKQALETVQRLLPVLCQAHGLTPAQVVAIASHDGGKQALETVQRLLPVLCQDHGLTPDQVVAIASNIGGKQALETVQRLLPVLCQDHGLTPEQVVAIASNIGGKQALETVQRLLPVLCQAHGLTPDQVVAIASNIGGKQALETVQRLLPVLCQAHGLTPAQVVAIASNNGGKQALETVQRLLPVLCQDHGLTPEQVVAIASNNGGRPALESIVAQLSRPDPALAALTNDHLVALACLGGRPALDAVKKGLPHAPALIKRTNRRIPERTSHRVADHAQVVRVLGFFQCHSHPAQAFDDAMTQFGMSRHGLLQLFRRVGVTELEARSGTLPPASQRWDRILQASGMKRAKPSPTSTQTPDQASLHAFADSLERDLDAPSPMHEGDQTRASASSGGSGGSGGSTNLSDIIEKETGKQLVIQESILMLPEEVEEVIGNKPESDILVHTAYDESTDENVMLLTSDAPEYKPWALVIQDSNGENKIKMLSGGSGGSGGSTNLSDIIEKETGKQLVIQESILMLPEEVEEVIGNKPESDILVHTAYDESTDENVMLLTSDAPEYKPWALVIQDSNGENKIKMLSGGSKRTADGSEFEPKKKRKV

SEQ ID NO: 95 - DNA, 4218 bp, Artificial Sequence
  BE4-32-WT-NC
atgaagcgcaccgccgacggctctgagttcgagagccccaagaagaagcggaaggtgagctccgagacaggaccagtggcagtggaccctacactgcggagaaggatcgagcctcacgagtttgaggtgttctttgatccaagagagctgaggaaggagacatgcctgctgtacgagatcaagtggggcacatctcacaagatctggcgccactctagcaagaacaccacaaagcacgtggaagtgaatttcatcgagaagtttaccagcgagcggcacttctgccctagcacctcctgttctatcacatggtttctgagctggtccccatgcggcgagtgtagcaaggccatcaccgagttcctgtcccagcacccaaacgtgaccctggtcatctacgtggccaggctgtatcaccacatggaccagcagaacaggcagggcctgcgggatctggtgaattccggcgtgaccatccagatcatgacagcccccgagtacgattactgttggagaaacttcgtgaactacccacctggcaaggaggcacactggcctaggtacccacccctgtggatgaagctgtatgcactggagctgcacgcaggaatcctgggcctgcctccatgcctgaatatcctgcgccggaagcagccccagctgaccttctttacaatcgccctgcagagctgtcactaccagcggctgccacctcacatcctgtgggcaaccggcctgaagtctggaggatcctctggaggaagctccggaagcgagacaccaggcacatctgagagcgccacaccagagtctagcggcggctcctctggaggatccatggactataaggaccacgacggagactacaaggatcatgatattgattacaaagacgatgacgataagatggccccaaagaagaagcggaaggtcggtatccacggagtcccagcagccgtagatttgagaactttgggatattcacagcagcagcaggaaaagatcaagcccaaagtgaggtcgacagtcgcgcagcatcacgaagcgctggtgggtcatgggtttacacatgcccacatcgtagccttgtcgcagcaccctgcagcccttggcacggtcgccgtcaagtaccaggacatgattgcggcgttgccggaagccacacatgaggcgatcgtcggtgtggggaaacagtggagcggagcccgagcgcttgaggccctgttgacggtcgcgggagagctgagagggcctccccttcagctggacacgggccagttgctgaagatcgcgaagcggggaggagtcacggcggtcgaggcggtacacgcgtggcgcaatgcgctcacgggagcacccctcaacctgacccccgaccaggttgtcgctattgctagtaacggcggaggcaaacaggcgctggaaacagttcagcgcctcttgccggtcttgtgtcaggaccacggcctgaccccagaacaagttgtcgcgattgcaagcaacaacggaggcaaacaagccttagaaacagtccagagattgttgccggtgctgtgccaagcccacggcctgaccccggaccaggtggttgcaatcgcgtcacacgatgggggaaagcaggccctagaaaccgttcagcgactcctgcccgtcctgtgccaggcccacggcctgaccccagcccaagttgtcgcgattgcaagcaacaacggaggcaaacaagccttagaaacagtccagagattgttgccggtgctgtgccaagaccacggcctgaccccggaccaggtggttgcaatcgcgtcacacgatgggggaaagcaggccctagaaaccgttcagcgactcctgcccgtcctgtgccaggaccacggcctgaccccagaacaagttgtcgcgattgcaagcaacaacggaggcaaacaagccttagaaacagtccagagattgttgccggtgctgtgccaagcccacggcctgacccccgaccaggttgtcgctattgctagtaacggcggaggcaaacaggcgctggaaacagttcagcgcctcttgccggtcttgtgtcaggcccacggcctgaccccagcccaggttgtggccatcgccagcaacataggtggcaagcaggccctcgaaaccgtccagagactgttaccggttctctgccaggaccacggcctgacccccgaccaggttgtcgctattgctagtaacggcggaggcaaacaggcgctggaaacagttcagcgcctcttgccggtcttgtgtcaggaccacggcctgaccccagaacaggttgtggccatcgccagcaacataggtggcaagcaggccctcgaaaccgtccagagactgttaccggttctctgccaggcccacggcctgaccccagaccaagttgtcgcgattgcaagcaacaacggaggcaaacaagccttagaaacagtccagagattgttgcctgtgctgtgccaagcccacggcctgacccccgcccaggttgtcgctattgctagtaacggcggaggcaaacaggcgctggaaacagttcagcgcctcttgccggtcttgtgtcaggaccacggcctgaccccggaccaggtggttgcaatcgcgtcacacgatgggggaaagcaggccctagaaaccgttcagcgactcctgcccgtcctgtgccaggaccacggcctgaccccagaacaagttgtcgcgattgcaagcaacaacggaggcaaacaagccttagaaacagtccagagattgttgccggtgctgtgccaagcccacggcctgaccccggaccaggtggttgcaatcgcgtcacacgatgggggaaagcaggccctagaaaccgttcagcgactcctgcccgtcctgtgccaggcccacggcctgaccccagcccaagttgtcgcgattgcaagcaacaacggaggcaaacaagccttagaaacagtccagagattgttgccggtgctgtgccaagaccacggcctgacccctgagcaggtagtggctattgcatccaacaacgggggcagacccgcactggagtcaatcgtggcccagctctcgaggccggaccccgcgctggccgcactcactaatgatcatcttgtagcgctggcctgcctcggcggacgacccgccttggatgcggtgaagaaggggctcccgcacgcgcctgcattgattaagcggaccaacagaaggatccccgagaggacatcacatcgagtggcagatcacgcgcaagtggtccgcgtgctcggattcttccagtgtcactcccaccccgcacaagcgttcgatgacgccatgactcaatttggtatgtcgagacacggactgctgcagctctttcgtagagtcggtgtcacagaactggaggcccgctcgggcacactgcctcccgcctcccagcggtgggacaggattctccaagcgagcggtatgaaacgcgcgaagccttcacctacgtcaactcagacacctgaccaggcgagccttcatgcgttcgcagactcgctggagagggatttggacgcgccctcgcccatgcatgaaggggaccaaactcgcgcgtcagccagctccggaggatctggaggaagcggaggatccaccaacctgtctgacatcatcgagaaggagacaggcaagcagctggtcatccaggagagcatcctgatgctgcccgaggaggtggaggaagtgatcggcaacaagcctgagtccgatatcctggtgcacaccgcctacgacgagtccacagatgagaatgtgatgctgctgacctctgacgccccagagtataagccctgggccctggtcatccaggatagcaacggcgagaataagatcaagatgctgtccggcggaagcggaggatccggaggctctaccaatctgtccgatattattgaaaaagagacaggcaagcaactggtcatccaggagtctatcctgatgctgccagaagaagtcgaagaagtgatcggaaacaagcccgaaagcgacatcctggtccatactgcctacgacgagagtaccgacgaaaatgtgatgttactgacctccgacgcccctgagtataagccatgggctctggtcatccaggactccaatggagaaaataagatcaagatgttaagcggcggctccaagagaacagccgacggctccgagttcgagcccaagaagaagcggaaagtg

SEQ ID NO: 96 - protein, 1406 aa, Artificial Sequence
  BE4-32-WT-NC
MKRTADGSEFESPKKKRKVSSETGPVAVDPTLRRRIEPHEFEVFFDPRELRKETCLLYEIKWGTSHKIWRHSSKNTTKHVEVNFIEKFTSERHFCPSTSCSITWFLSWSPCGECSKAITEFLSQHPNVTLVIYVARLYHHMDQQNRQGLRDLVNSGVTIQIMTAPEYDYCWRNFVNYPPGKEAHWPRYPPLWMKLYALELHAGILGLPPCLNILRRKQPQLTFFTIALQSCHYQRLPPHILWATGLKSGGSSGGSSGSETPGTSESATPESSGGSSGGSMDYKDHDGDYKDHDIDYKDDDDKMAPKKKRKVGIHGVPAAVDLRTLGYSQQQQEKIKPKVRSTVAQHHEALVGHGFTHAHIVALSQHPAALGTVAVKYQDMIAALPEATHEAIVGVGKQWSGARALEALLTVAGELRGPPLQLDTGQLLKIAKRGGVTAVEAVHAWRNALTGAPLNLTPDQVVAIASNGGGKQALETVQRLLPVLCQDHGLTPEQVVAIASNNGGKQALETVQRLLPVLCQAHGLTPDQVVAIASHDGGKQALETVQRLLPVLCQAHGLTPAQVVAIASNNGGKQALETVQRLLPVLCQDHGLTPDQVVAIASHDGGKQALETVQRLLPVLCQDHGLTPEQVVAIASNNGGKQALETVQRLLPVLCQAHGLTPDQVVAIASNGGGKQALETVQRLLPVLCQAHGLTPAQVVAIASNIGGKQALETVQRLLPVLCQDHGLTPDQVVAIASNGGGKQALETVQRLLPVLCQDHGLTPEQVVAIASNIGGKQALETVQRLLPVLCQAHGLTPDQVVAIASNNGGKQALETVQRLLPVLCQAHGLTPAQVVAIASNGGGKQALETVQRLLPVLCQDHGLTPDQVVAIASHDGGKQALETVQRLLPVLCQDHGLTPEQVVAIASNNGGKQALETVQRLLPVLCQAHGLTPDQVVAIASHDGGKQALETVQRLLPVLCQAHGLTPAQVVAIASNNGGKQALETVQRLLPVLCQDHGLTPEQVVAIASNNGGRPALESIVAQLSRPDPALAALTNDHLVALACLGGRPALDAVKKGLPHAPALIKRTNRRIPERTSHRVADHAQVVRVLGFFQCHSHPAQAFDDAMTQFGMSRHGLLQLFRRVGVTELEARSGTLPPASQRWDRILQASGMKRAKPSPTSTQTPDQASLHAFADSLERDLDAPSPMHEGDQTRASASSGGSGGSGGSTNLSDIIEKETGKQLVIQESILMLPEEVEEVIGNKPESDILVHTAYDESTDENVMLLTSDAPEYKPWALVIQDSNGENKIKMLSGGSGGSGGSTNLSDIIEKETGKQLVIQESILMLPEEVEEVIGNKPESDILVHTAYDESTDENVMLLTSDAPEYKPWALVIQDSNGENKIKMLSGGSKRTADGSEFEPKKKRKV

SEQ ID NO: 97 - DNA, 3873 bp, Artificial Sequence
  BE4-32-63
atgaagcgcaccgccgacggctctgagttcgagagccccaagaagaagcggaaggtgagctccgagacaggaccagtggcagtggaccctacactgcggagaaggatcgagcctcacgagtttgaggtgttctttgatccaagagagctgaggaaggagacatgcctgctgtacgagatcaagtggggcacatctcacaagatctggcgccactctagcaagaacaccacaaagcacgtggaagtgaatttcatcgagaagtttaccagcgagcggcacttctgccctagcacctcctgttctatcacatggtttctgagctggtccccatgcggcgagtgtagcaaggccatcaccgagttcctgtcccagcacccaaacgtgaccctggtcatctacgtggccaggctgtatcaccacatggaccagcagaacaggcagggcctgcgggatctggtgaattccggcgtgaccatccagatcatgacagcccccgagtacgattactgttggagaaacttcgtgaactacccacctggcaaggaggcacactggcctaggtacccacccctgtggatgaagctgtatgcactggagctgcacgcaggaatcctgggcctgcctccatgcctgaatatcctgcgccggaagcagccccagctgaccttctttacaatcgccctgcagagctgtcactaccagcggctgccacctcacatcctgtgggcaaccggcctgaagtctggaggatcctctggaggaagctccggaagcgagacaccaggcacatctgagagcgccacaccagagtctagcggcggctcctctggaggatccatggactataaggaccacgacggagactacaaggatcatgatattgattacaaagacgatgacgataagatggccccaaagaagaagcggaaggtcggtatccacggagtcccagcagccgtagatttgagaactttgggatattcacagcagcagcaggaaaagatcaagcccaaagtgaggtcgacagtcgcgcagcatcacgaagcgctggtgggtcatgggtttacacatgcccacatcgtagccttgtcgcagcaccctgcagcccttggcacggtcgccgtcaagtaccaggacatgattgcggcgttgccggaagccacacatgaggcgatcgtcggtgtggggaaacagtggagcggagcccgagcgcttgaggccctgttgacggtcgcgggagagctgagagggcctccccttcagctggacacgggccagttgctgaagatcgcgaagcggggaggagtcacggcggtcgaggcggtacacgcgtggcgcaatgcgctcacgggagcacccctcaacctgaccccagaccaggttgtggccatcgccagcaacataggtggcaagcaggccctcgaaaccgtccagagactgttaccggttctctgccaggaccacggcctgaccccggaacaggtggttgcaatcgcgtcacacgatgggggaaagcaggccctagaaaccgttcagcgactcctgcccgtcctgtgccaggcccacggcctgaccccagaccaggttgtggccatcgccagcaacataggtggcaagcaggccctcgaaaccgtccagagactgttaccggttctctgccaggcccacggcctgaccccagcccaagttgtcgcgattgcaagcaacaacggaggcaaacaagccttagaaacagtccagagattgttgccggtgctgtgccaagaccacggcctgaccccagaccaggttgtggccatcgccagcaacataggtggcaagcaggccctcgaaaccgtccagagactgttaccggttctctgccaggaccacggcctgaccccagaacaggttgtggccatcgccagcaacataggtggcaagcaggccctcgaaaccgtccagagactgttaccggttctctgccaggcccacggcctgaccccagaccaagttgtcgcgattgcaagcaacaacggaggcaaacaagccttagaaacagtccagagattgttgcctgtgctgtgccaagcccacggcctgaccccggcccaggtggttgcaatcgcgtcacacgatgggggaaagcaggccctagaaaccgttcagcgactcctgcccgtcctgtgccaggaccacggcctgaccccagaccaagttgtcgcgattgcaagcaacaacggaggcaaacaagccttagaaacagtccagagattgttgccggtgctgtgccaagaccacggcctgaccccagaacaagttgtcgcgattgcaagcaacaacggaggcaaacaagccttagaaacagtccagagattgttgccggtgctgtgccaagcccacggcctgaccccagaccaagttgtcgcgattgcaagcaacaacggaggcaaacaagccttagaaacagtccagagattgttgcctgtgctgtgccaagcccacggcctgaccccggcccaggtggttgcaatcgcgtcacacgatgggggaaagcaggccctagaaaccgttcagcgactcctgcccgtcctgtgccaggaccacggcctgaccccagaccaggttgtggccatcgccagcaacataggtggcaagcaggccctcgaaaccgtccagagactgttaccggttctctgccaggaccacggcctgaccccagaacaggttgtggccatcgccagcaacataggtggcaagcaggccctcgaaaccgtccagagactgttaccggttctctgccaggcccacggcctgaccccagaccaggttgtggccatcgccagcaacataggtggcaagcaggccctcgaaaccgtccagagactgttaccggttctctgccaggcccacggcctgaccccagcccaagttgtcgcgattgcaagcaacaacggaggcaaacaagccttagaaacagtccagagattgttgccggtgctgtgccaagaccacggcctgacccctgagcaggtagtggctattgcatccaacaacgggggcagacccgcactggagtcaatcgtggcccagctttcgaggccggaccccgcgctggccgcactcactaatgatcatcttgtagcgctggcctgcctcggcggacgacccgccttggatgcggtgaagaaggggctcccgcacgcgcctgcattgattaagcggaccaacagaaggatccccgagaggacatcacatcgagtggcaggttcctccggaggatctggaggaagcggaggatccaccaacctgtctgacatcatcgagaaggagacaggcaagcagctggtcatccaggagagcatcctgatgctgcccgaggaggtggaggaagtgatcggcaacaagcctgagtccgatatcctggtgcacaccgcctacgacgagtccacagatgagaatgtgatgctgctgacctctgacgccccagagtataagccctgggccctggtcatccaggatagcaacggcgagaataagatcaagatgctgtccggcggaagcggaggatccggaggctctaccaatctgtccgatattattgaaaaagagacaggcaagcaactggtcatccaggagtctatcctgatgctgccagaagaagtcgaagaagtgatcggaaacaagcccgaaagcgacatcctggtccatactgcctacgacgagagtaccgacgaaaatgtgatgttactgacctccgacgcccctgagtataagccatgggctctggtcatccaggactccaatggagaaaataagatcaagatgttaagcggcggctccaagagaacagccgacggctccgagttcgagcccaagaagaagcggaaagtg

SEQ ID NO: 98 - protein, 1291 aa, Artificial Sequence
  BE4-32-63
MKRTADGSEFESPKKKRKVSSETGPVAVDPTLRRRIEPHEFEVFFDPRELRKETCLLYEIKWGTSHKIWRHSSKNTTKHVEVNFIEKFTSERHFCPSTSCSITWFLSWSPCGECSKAITEFLSQHPNVTLVIYVARLYHHMDQQNRQGLRDLVNSGVTIQIMTAPEYDYCWRNFVNYPPGKEAHWPRYPPLWMKLYALELHAGILGLPPCLNILRRKQPQLTFFTIALQSCHYQRLPPHILWATGLKSGGSSGGSSGSETPGTSESATPESSGGSSGGSMDYKDHDGDYKDHDIDYKDDDDKMAPKKKRKVGIHGVPAAVDLRTLGYSQQQQEKIKPKVRSTVAQHHEALVGHGFTHAHIVALSQHPAALGTVAVKYQDMIAALPEATHEAIVGVGKQWSGARALEALLTVAGELRGPPLQLDTGQLLKIAKRGGVTAVEAVHAWRNALTGAPLNLTPDQVVAIASNIGGKQALETVQRLLPVLCQDHGLTPEQVVAIASHDGGKQALETVQRLLPVLCQAHGLTPDQVVAIASNIGGKQALETVQRLLPVLCQAHGLTPAQVVAIASNNGGKQALETVQRLLPVLCQDHGLTPDQVVAIASNIGGKQALETVQRLLPVLCQDHGLTPEQVVAIASNIGGKQALETVQRLLPVLCQAHGLTPDQVVAIASNNGGKQALETVQRLLPVLCQAHGLTPAQVVAIASHDGGKQALETVQRLLPVLCQDHGLTPDQVVAIASNNGGKQALETVQRLLPVLCQDHGLTPEQVVAIASNNGGKQALETVQRLLPVLCQAHGLTPDQVVAIASNNGGKQALETVQRLLPVLCQAHGLTPAQVVAIASHDGGKQALETVQRLLPVLCQDHGLTPDQVVAIASNIGGKQALETVQRLLPVLCQDHGLTPEQVVAIASNIGGKQALETVQRLLPVLCQAHGLTPDQVVAIASNIGGKQALETVQRLLPVLCQAHGLTPAQVVAIASNNGGKQALETVQRLLPVLCQDHGLTPEQVVAIASNNGGRPALESIVAQLSRPDPALAALTNDHLVALACLGGRPALDAVKKGLPHAPALIKRTNRRIPERTSHRVAGSSGGSGGSGGSTNLSDIIEKETGKQLVIQESILMLPEEVEEVIGNKPESDILVHTAYDESTDENVMLLTSDAPEYKPWALVIQDSNGENKIKMLSGGSGGSGGSTNLSDIIEKETGKQLVIQESILMLPEEVEEVIGNKPESDILVHTAYDESTDENVMLLTSDAPEYKPWALVIQDSNGENKIKMLSGGSKRTADGSEFEPKKKRKV

SEQ ID NO: 99 - DNA, 3873 bp, Artificial Sequence
  BE4-32-63-NC
atgaagcgcaccgccgacggctctgagttcgagagccccaagaagaagcggaaggtgagctccgagacaggaccagtggcagtggaccctacactgcggagaaggatcgagcctcacgagtttgaggtgttctttgatccaagagagctgaggaaggagacatgcctgctgtacgagatcaagtggggcacatctcacaagatctggcgccactctagcaagaacaccacaaagcacgtggaagtgaatttcatcgagaagtttaccagcgagcggcacttctgccctagcacctcctgttctatcacatggtttctgagctggtccccatgcggcgagtgtagcaaggccatcaccgagttcctgtcccagcacccaaacgtgaccctggtcatctacgtggccaggctgtatcaccacatggaccagcagaacaggcagggcctgcgggatctggtgaattccggcgtgaccatccagatcatgacagcccccgagtacgattactgttggagaaacttcgtgaactacccacctggcaaggaggcacactggcctaggtacccacccctgtggatgaagctgtatgcactggagctgcacgcaggaatcctgggcctgcctccatgcctgaatatcctgcgccggaagcagccccagctgaccttctttacaatcgccctgcagagctgtcactaccagcggctgccacctcacatcctgtgggcaaccggcctgaagtctggaggatcctctggaggaagctccggaagcgagacaccaggcacatctgagagcgccacaccagagtctagcggcggctcctctggaggatccatggactataaggaccacgacggagactacaaggatcatgatattgattacaaagacgatgacgataagatggccccaaagaagaagcggaaggtcggtatccacggagtcccagcagccgtagatttgagaactttgggatattcacagcagcagcaggaaaagatcaagcccaaagtgaggtcgacagtcgcgcagcatcacgaagcgctggtgggtcatgggtttacacatgcccacatcgtagccttgtcgcagcaccctgcagcccttggcacggtcgccgtcaagtaccaggacatgattgcggcgttgccggaagccacacatgaggcgatcgtcggtgtggggaaacagtggagcggagcccgagcgcttgaggccctgttgacggtcgcgggagagctgagagggcctccccttcagctggacacgggccagttgctgaagatcgcgaagcggggaggagtcacggcggtcgaggcggtacacgcgtggcgcaatgcgctcacgggagcacccctcaacctgacccccgaccaggttgtcgctattgctagtaacggcggaggcaaacaggcgctggaaacagttcagcgcctcttgccggtcttgtgtcaggaccacggcctgaccccagaacaagttgtcgcgattgcaagcaacaacggaggcaaacaagccttagaaacagtccagagattgttgccggtgctgtgccaagcccacggcctgaccccggaccaggtggttgcaatcgcgtcacacgatgggggaaagcaggccctagaaaccgttcagcgactcctgcccgtcctgtgccaggcccacggcctgaccccagcccaagttgtcgcgattgcaagcaacaacggaggcaaacaagccttagaaacagtccagagattgttgccggtgctgtgccaagaccacggcctgaccccggaccaggtggttgcaatcgcgtcacacgatgggggaaagcaggccctagaaaccgttcagcgactcctgcccgtcctgtgccaggaccacggcctgaccccagaacaagttgtcgcgattgcaagcaacaacggaggcaaacaagccttagaaacagtccagagattgttgccggtgctgtgccaagcccacggcctgacccccgaccaggttgtcgctattgctagtaacggcggaggcaaacaggcgctggaaacagttcagcgcctcttgccggtcttgtgtcaggcccacggcctgaccccagcccaggttgtggccatcgccagcaacataggtggcaagcaggccctcgaaaccgtccagagactgttaccggttctctgccaggaccacggcctgacccccgaccaggttgtcgctattgctagtaacggcggaggcaaacaggcgctggaaacagttcagcgcctcttgccggtcttgtgtcaggaccacggcctgaccccagaacaggttgtggccatcgccagcaacataggtggcaagcaggccctcgaaaccgtccagagactgttaccggttctctgccaggcccacggcctgaccccagaccaagttgtcgcgattgcaagcaacaacggaggcaaacaagccttagaaacagtccagagattgttgcctgtgctgtgccaagcccacggcctgacccccgcccaggttgtcgctattgctagtaacggcggaggcaaacaggcgctggaaacagttcagcgcctcttgccggtcttgtgtcaggaccacggcctgaccccggaccaggtggttgcaatcgcgtcacacgatgggggaaagcaggccctagaaaccgttcagcgactcctgcccgtcctgtgccaggaccacggcctgaccccagaacaagttgtcgcgattgcaagcaacaacggaggcaaacaagccttagaaacagtccagagattgttgccggtgctgtgccaagcccacggcctgaccccggaccaggtggttgcaatcgcgtcacacgatgggggaaagcaggccctagaaaccgttcagcgactcctgcccgtcctgtgccaggcccacggcctgaccccagcccaagttgtcgcgattgcaagcaacaacggaggcaaacaagccttagaaacagtccagagattgttgccggtgctgtgccaagaccacggcctgacccctgagcaggtagtggctattgcatccaacaacgggggcagacccgcactggagtcaatcgtggcccagctttcgaggccggaccccgcgctggccgcactcactaatgatcatcttgtagcgctggcctgcctcggcggacgacccgccttggatgcggtgaagaaggggctcccgcacgcgcctgcattgattaagcggaccaacagaaggatccccgagaggacatcacatcgagtggcaggttcctccggaggatctggaggaagcggaggatccaccaacctgtctgacatcatcgagaaggagacaggcaagcagctggtcatccaggagagcatcctgatgctgcccgaggaggtggaggaagtgatcggcaacaagcctgagtccgatatcctggtgcacaccgcctacgacgagtccacagatgagaatgtgatgctgctgacctctgacgccccagagtataagccctgggccctggtcatccaggatagcaacggcgagaataagatcaagatgctgtccggcggaagcggaggatccggaggctctaccaatctgtccgatattattgaaaaagagacaggcaagcaactggtcatccaggagtctatcctgatgctgccagaagaagtcgaagaagtgatcggaaacaagcccgaaagcgacatcctggtccatactgcctacgacgagagtaccgacgaaaatgtgatgttactgacctccgacgcccctgagtataagccatgggctctggtcatccaggactccaatggagaaaataagatcaagatgttaagcggcggctccaagagaacagccgacggctccgagttcgagcccaagaagaagcggaaagtg

SEQ ID NO: 100 - protein, 1291 aa, Artificial Sequence
  BE4-32-63-NC
MKRTADGSEFESPKKKRKVSSETGPVAVDPTLRRRIEPHEFEVFFDPRELRKETCLLYEIKWGTSHKIWRHSSKNTTKHVEVNFIEKFTSERHFCPSTSCSITWFLSWSPCGECSKAITEFLSQHPNVTLVIYVARLYHHMDQQNRQGLRDLVNSGVTIQIMTAPEYDYCWRNFVNYPPGKEAHWPRYPPLWMKLYALELHAGILGLPPCLNILRRKQPQLTFFTIALQSCHYQRLPPHILWATGLKSGGSSGGSSGSETPGTSESATPESSGGSSGGSMDYKDHDGDYKDHDIDYKDDDDKMAPKKKRKVGIHGVPAAVDLRTLGYSQQQQEKIKPKVRSTVAQHHEALVGHGFTHAHIVALSQHPAALGTVAVKYQDMIAALPEATHEAIVGVGKQWSGARALEALLTVAGELRGPPLQLDTGQLLKIAKRGGVTAVEAVHAWRNALTGAPLNLTPDQVVAIASNGGGKQALETVQRLLPVLCQDHGLTPEQVVAIASNNGGKQALETVQRLLPVLCQAHGLTPDQVVAIASHDGGKQALETVQRLLPVLCQAHGLTPAQVVAIASNNGGKQALETVQRLLPVLCQDHGLTPDQVVAIASHDGGKQALETVQRLLPVLCQDHGLTPEQVVAIASNNGGKQALETVQRLLPVLCQAHGLTPDQVVAIASNGGGKQALETVQRLLPVLCQAHGLTPAQVVAIASNIGGKQALETVQRLLPVLCQDHGLTPDQVVAIASNGGGKQALETVQRLLPVLCQDHGLTPEQVVAIASNIGGKQALETVQRLLPVLCQAHGLTPDQVVAIASNNGGKQALETVQRLLPVLCQAHGLTPAQVVAIASNGGGKQALETVQRLLPVLCQDHGLTPDQVVAIASHDGGKQALETVQRLLPVLCQDHGLTPEQVVAIASNNGGKQALETVQRLLPVLCQAHGLTPDQVVAIASHDGGKQALETVQRLLPVLCQAHGLTPAQVVAIASNNGGKQALETVQRLLPVLCQDHGLTPEQVVAIASNNGGRPALESIVAQLSRPDPALAALTNDHLVALACLGGRPALDAVKKGLPHAPALIKRTNRRIPERTSHRVAGSSGGSGGSGGSTNLSDIIEKETGKQLVIQESILMLPEEVEEVIGNKPESDILVHTAYDESTDENVMLLTSDAPEYKPWALVIQDSNGENKIKMLSGGSGGSGGSTNLSDIIEKETGKQLVIQESILMLPEEVEEVIGNKPESDILVHTAYDESTDENVMLLTSDAPEYKPWALVIQDSNGENKIKMLSGGSKRTADGSEFEPKKKRKV

SEQ ID NO: 101 - DNA, 3864 bp, Artificial Sequence
  BE4-32-47
atgaagcgcaccgccgacggctctgagttcgagagccccaagaagaagcggaaggtgagctccgagacaggaccagtggcagtggaccctacactgcggagaaggatcgagcctcacgagtttgaggtgttctttgatccaagagagctgaggaaggagacatgcctgctgtacgagatcaagtggggcacatctcacaagatctggcgccactctagcaagaacaccacaaagcacgtggaagtgaatttcatcgagaagtttaccagcgagcggcacttctgccctagcacctcctgttctatcacatggtttctgagctggtccccatgcggcgagtgtagcaaggccatcaccgagttcctgtcccagcacccaaacgtgaccctggtcatctacgtggccaggctgtatcaccacatggaccagcagaacaggcagggcctgcgggatctggtgaattccggcgtgaccatccagatcatgacagcccccgagtacgattactgttggagaaacttcgtgaactacccacctggcaaggaggcacactggcctaggtacccacccctgtggatgaagctgtatgcactggagctgcacgcaggaatcctgggcctgcctccatgcctgaatatcctgcgccggaagcagccccagctgaccttctttacaatcgccctgcagagctgtcactaccagcggctgccacctcacatcctgtgggcaaccggcctgaagtctggaggatcctctggaggaagctccggaagcgagacaccaggcacatctgagagcgccacaccagagtctagcggcggctcctctggaggatccatggcttcctcccctccaaagaaaaagagaaaggttgcggccgctgactacaaggatgacgacgataaaagttggaaggacgcaagtggttggtctagaatgcatgcggccccgcgacggcgtgctgcgcaaccctccgacgcttcgccggccgcgcaggtggatctacgcacgctcggctacagtcagcagcagcaagagaagatcaaaccgaaggtgcgttcgacagtggcgcagcaccacgaggcactggtgggccatgggtttacacacgcgcacatcgttgcgctcagccaacacccggcagcgttagggaccgtcgctgtcacgtatcagcacataatcacggcgttgccagaggcgacacacgaagacatcgttggcgtcggcaaacagtggtccggcgcacgcgccctggaggccttgctcacggatgcgggggagttgagaggtccgccgttacagttggacacaggccaacttgtgaagattgcaaaacgtggcggcgtgaccgcaatggaggcagtgcatgcatcgcgcaatgcgctcacgggagcacccctcaacctgaccccagaccaggttgtggccatcgccagcaacataggtggcaagcaggccctcgaaaccgtccagagactgttaccggttctctgccaggaccacggcctgaccccggaacaggtggttgcaatcgcgtcacacgatgggggaaagcaggccctagaaaccgttcagcgactcctgcccgtcctgtgccaggcccacggcctgaccccagaccaggttgtggccatcgccagcaacataggtggcaagcaggccctcgaaaccgtccagagactgttaccggttctctgccaggcccacggcctgaccccagcccaagttgtcgcgattgcaagcaacaacggaggcaaacaagccttagaaacagtccagagattgttgccggtgctgtgccaagaccacggcctgaccccagaccaggttgtggccatcgccagcaacataggtggcaagcaggccctcgaaaccgtccagagactgttaccggttctctgccaggaccacggcctgaccccagaacaggttgtggccatcgccagcaacataggtggcaagcaggccctcgaaaccgtccagagactgttaccggttctctgccaggcccacggcctgaccccagaccaagttgtcgcgattgcaagcaacaacggaggcaaacaagccttagaaacagtccagagattgttgcctgtgctgtgccaagcccacggcctgaccccggcccaggtggttgcaatcgcgtcacacgatgggggaaagcaggccctagaaaccgttcagcgactcctgcccgtcctgtgccaggaccacggcctgaccccagaccaagttgtcgcgattgcaagcaacaacggaggcaaacaagccttagaaacagtccagagattgttgccggtgctgtgccaagaccacggcctgaccccagaacaagttgtcgcgattgcaagcaacaacggaggcaaacaagccttagaaacagtccagagattgttgccggtgctgtgccaagcccacggcctgaccccagaccaagttgtcgcgattgcaagcaacaacggaggcaaacaagccttagaaacagtccagagattgttgcctgtgctgtgccaagcccacggcctgaccccggcccaggtggttgcaatcgcgtcacacgatgggggaaagcaggccctagaaaccgttcagcgactcctgcccgtcctgtgccaggaccacggcctgaccccagaccaggttgtggccatcgccagcaacataggtggcaagcaggccctcgaaaccgtccagagactgttaccggttctctgccaggaccacggcctgaccccagaacaggttgtggccatcgccagcaacataggtggcaagcaggccctcgaaaccgtccagagactgttaccggttctctgccaggcccacggcctgaccccagaccaggttgtggccatcgccagcaacataggtggcaagcaggccctcgaaaccgtccagagactgttaccggttctctgccaggcccacggcctgaccccagcccaagttgtcgcgattgcaagcaacaacggaggcaaacaagccttagaaacagtccagagattgttgccggtgctgtgccaagaccacggcctgacccctgagcaggtagtggctattgcatccaacaacgggggcagacccgcactggagtcaatcgtggcccagctttcgaggccggaccccgcgctggccgcactcactaatgatcatcttgtagcgctggcctgcctcggcggacgtcctgccatggatgcagtgaaaaagggattgccgcacgcgccggaattgatcagatcctccggaggatctggaggaagcggaggatccaccaacctgtctgacatcatcgagaaggagacaggcaagcagctggtcatccaggagagcatcctgatgctgcccgaggaggtggaggaagtgatcggcaacaagcctgagtccgatatcctggtgcacaccgcctacgacgagtccacagatgagaatgtgatgctgctgacctctgacgccccagagtataagccctgggccctggtcatccaggatagcaacggcgagaataagatcaagatgctgtccggcggaagcggaggatccggaggctctaccaatctgtccgatattattgaaaaagagacaggcaagcaactggtcatccaggagtctatcctgatgctgccagaagaagtcgaagaagtgatcggaaacaagcccgaaagcgacatcctggtccatactgcctacgacgagagtaccgacgaaaatgtgatgttactgacctccgacgcccctgagtataagccatgggctctggtcatccaggactccaatggagaaaataagatcaagatgttaagcggcggctccaagagaacagccgacggctccgagttcgagcccaagaagaagcggaaagtg

SEQ ID NO: 102 - protein, 1288 aa, Artificial Sequence
  BE4-32-47
MKRTADGSEFESPKKKRKVSSETGPVAVDPTLRRRIEPHEFEVFFDPRELRKETCLLYEIKWGTSHKIWRHSSKNTTKHVEVNFIEKFTSERHFCPSTSCSITWFLSWSPCGECSKAITEFLSQHPNVTLVIYVARLYHHMDQQNRQGLRDLVNSGVTIQIMTAPEYDYCWRNFVNYPPGKEAHWPRYPPLWMKLYALELHAGILGLPPCLNILRRKQPQLTFFTIALQSCHYQRLPPHILWATGLKSGGSSGGSSGSETPGTSESATPESSGGSSGGSMASSPPKKKRKVAAADYKDDDDKSWKDASGWSRMHAAPRRRAAQPSDASPAAQVDLRTLGYSQQQQEKIKPKVRSTVAQHHEALVGHGFTHAHIVALSQHPAALGTVAVTYQHIITALPEATHEDIVGVGKQWSGARALEALLTDAGELRGPPLQLDTGQLVKIAKRGGVTAMEAVHASRNALTGAPLNLTPDQVVAIASNIGGKQALETVQRLLPVLCQDHGLTPEQVVAIASHDGGKQALETVQRLLPVLCQAHGLTPDQVVAIASNIGGKQALETVQRLLPVLCQAHGLTPAQVVAIASNNGGKQALETVQRLLPVLCQDHGLTPDQVVAIASNIGGKQALETVQRLLPVLCQDHGLTPEQVVAIASNIGGKQALETVQRLLPVLCQAHGLTPDQVVAIASNNGGKQALETVQRLLPVLCQAHGLTPAQVVAIASHDGGKQALETVQRLLPVLCQDHGLTPDQVVAIASNNGGKQALETVQRLLPVLCQDHGLTPEQVVAIASNNGGKQALETVQRLLPVLCQAHGLTPDQVVAIASNNGGKQALETVQRLLPVLCQAHGLTPAQVVAIASHDGGKQALETVQRLLPVLCQDHGLTPDQVVAIASNIGGKQALETVQRLLPVLCQDHGLTPEQVVAIASNIGGKQALETVQRLLPVLCQAHGLTPDQVVAIASNIGGKQALETVQRLLPVLCQAHGLTPAQVVAIASNNGGKQALETVQRLLPVLCQDHGLTPEQVVAIASNNGGRPALESIVAQLSRPDPALAALTNDHLVALACLGGRPAMDAVKKGLPHAPELIRSSGGSGGSGGSTNLSDIIEKETGKQLVIQESILMLPEEVEEVIGNKPESDILVHTAYDESTDENVMLLTSDAPEYKPWALVIQDSNGENKIKMLSGGSGGSGGSTNLSDIIEKETGKQLVIQESILMLPEEVEEVIGNKPESDILVHTAYDESTDENVMLLTSDAPEYKPWALVIQDSNGENKIKMLSGGSKRTADGSEFEPKKKRKV

SEQ ID NO: 103 - DNA, 3864 bp, Artificial Sequence
  BE4-32-47-NC
atgaagcgcaccgccgacggctctgagttcgagagccccaagaagaagcggaaggtgagctccgagacaggaccagtggcagtggaccctacactgcggagaaggatcgagcctcacgagtttgaggtgttctttgatccaagagagctgaggaaggagacatgcctgctgtacgagatcaagtggggcacatctcacaagatctggcgccactctagcaagaacaccacaaagcacgtggaagtgaatttcatcgagaagtttaccagcgagcggcacttctgccctagcacctcctgttctatcacatggtttctgagctggtccccatgcggcgagtgtagcaaggccatcaccgagttcctgtcccagcacccaaacgtgaccctggtcatctacgtggccaggctgtatcaccacatggaccagcagaacaggcagggcctgcgggatctggtgaattccggcgtgaccatccagatcatgacagcccccgagtacgattactgttggagaaacttcgtgaactacccacctggcaaggaggcacactggcctaggtacccacccctgtggatgaagctgtatgcactggagctgcacgcaggaatcctgggcctgcctccatgcctgaatatcctgcgccggaagcagccccagctgaccttctttacaatcgccctgcagagctgtcactaccagcggctgccacctcacatcctgtgggcaaccggcctgaagtctggaggatcctctggaggaagctccggaagcgagacaccaggcacatctgagagcgccacaccagagtctagcggcggctcctctggaggatccatggcttcctcccctccaaagaaaaagagaaaggttgcggccgctgactacaaggatgacgacgataaaagttggaaggacgcaagtggttggtctagaatgcatgcggccccgcgacggcgtgctgcgcaaccctccgacgcttcgccggccgcgcaggtggatctacgcacgctcggctacagtcagcagcagcaagagaagatcaaaccgaaggtgcgttcgacagtggcgcagcaccacgaggcactggtgggccatgggtttacacacgcgcacatcgttgcgctcagccaacacccggcagcgttagggaccgtcgctgtcacgtatcagcacataatcacggcgttgccagaggcgacacacgaagacatcgttggcgtcggcaaacagtggtccggcgcacgcgccctggaggccttgctcacggatgcgggggagttgagaggtccgccgttacagttggacacaggccaacttgtgaagattgcaaaacgtggcggcgtgaccgcaatggaggcagtgcatgcatcgcgcaatgcgctcacgggagcacccctcaacctgacccccgaccaggttgtcgctattgctagtaacggcggaggcaaacaggcgctggaaacagttcagcgcctcttgccggtcttgtgtcaggaccacggcctgaccccagaacaagttgtcgcgattgcaagcaacaacggaggcaaacaagccttagaaacagtccagagattgttgccggtgctgtgccaagcccacggcctgaccccggaccaggtggttgcaatcgcgtcacacgatgggggaaagcaggccctagaaaccgttcagcgactcctgcccgtcctgtgccaggcccacggcctgaccccagcccaagttgtcgcgattgcaagcaacaacggaggcaaacaagccttagaaacagtccagagattgttgccggtgctgtgccaagaccacggcctgaccccggaccaggtggttgcaatcgcgtcacacgatgggggaaagcaggccctagaaaccgttcagcgactcctgcccgtcctgtgccaggaccacggcctgaccccagaacaagttgtcgcgattgcaagcaacaacggaggcaaacaagccttagaaacagtccagagattgttgccggtgctgtgccaagcccacggcctgacccccgaccaggttgtcgctattgctagtaacggcggaggcaaacaggcgctggaaacagttcagcgcctcttgccggtcttgtgtcaggcccacggcctgaccccagcccaggttgtggccatcgccagcaacataggtggcaagcaggccctcgaaaccgtccagagactgttaccggttctctgccaggaccacggcctgacccccgaccaggttgtcgctattgctagtaacggcggaggcaaacaggcgctggaaacagttcagcgcctcttgccggtcttgtgtcaggaccacggcctgaccccagaacaggttgtggccatcgccagcaacataggtggcaagcaggccctcgaaaccgtccagagactgttaccggttctctgccaggcccacggcctgaccccagaccaagttgtcgcgattgcaagcaacaacggaggcaaacaagccttagaaacagtccagagattgttgcctgtgctgtgccaagcccacggcctgacccccgcccaggttgtcgctattgctagtaacggcggaggcaaacaggcgctggaaacagttcagcgcctcttgccggtcttgtgtcaggaccacggcctgaccccggaccaggtggttgcaatcgcgtcacacgatgggggaaagcaggccctagaaaccgttcagcgactcctgcccgtcctgtgccaggaccacggcctgaccccagaacaagttgtcgcgattgcaagcaacaacggaggcaaacaagccttagaaacagtccagagattgttgccggtgctgtgccaagcccacggcctgaccccggaccaggtggttgcaatcgcgtcacacgatgggggaaagcaggccctagaaaccgttcagcgactcctgcccgtcctgtgccaggcccacggcctgaccccagcccaagttgtcgcgattgcaagcaacaacggaggcaaacaagccttagaaacagtccagagattgttgccggtgctgtgccaagaccacggcctgacccctgagcaggtagtggctattgcatccaacaacgggggcagacccgcactggagtcaatcgtggcccagctttcgaggccggaccccgcgctggccgcactcactaatgatcatcttgtagcgctggcctgcctcggcggacgtcctgccatggatgcagtgaaaaagggattgccgcacgcgccggaattgatcagatcctccggaggatctggaggaagcggaggatccaccaacctgtctgacatcatcgagaaggagacaggcaagcagctggtcatccaggagagcatcctgatgctgcccgaggaggtggaggaagtgatcggcaacaagcctgagtccgatatcctggtgcacaccgcctacgacgagtccacagatgagaatgtgatgctgctgacctctgacgccccagagtataagccctgggccctggtcatccaggatagcaacggcgagaataagatcaagatgctgtccggcggaagcggaggatccggaggctctaccaatctgtccgatattattgaaaaagagacaggcaagcaactggtcatccaggagtctatcctgatgctgccagaagaagtcgaagaagtgatcggaaacaagcccgaaagcgacatcctggtccatactgcctacgacgagagtaccgacgaaaatgtgatgttactgacctccgacgcccctgagtataagccatgggctctggtcatccaggactccaatggagaaaataagatcaagatgttaagcggcggctccaagagaacagccgacggctccgagttcgagcccaagaagaagcggaaagtg

SEQ ID NO: 104 - protein, 1288 aa, Artificial Sequence
  BE4-32-47-NC
MKRTADGSEFESPKKKRKVSSETGPVAVDPTLRRRIEPHEFEVFFDPRELRKETCLLYEIKWGTSHKIWRHSSKNTTKHVEVNFIEKFTSERHFCPSTSCSITWFLSWSPCGECSKAITEFLSQHPNVTLVIYVARLYHHMDQQNRQGLRDLVNSGVTIQIMTAPEYDYCWRNFVNYPPGKEAHWPRYPPLWMKLYALELHAGILGLPPCLNILRRKQPQLTFFTIALQSCHYQRLPPHILWATGLKSGGSSGGSSGSETPGTSESATPESSGGSSGGSMASSPPKKKRKVAAADYKDDDDKSWKDASGWSRMHAAPRRRAAQPSDASPAAQVDLRTLGYSQQQQEKIKPKVRSTVAQHHEALVGHGFTHAHIVALSQHPAALGTVAVTYQHIITALPEATHEDIVGVGKQWSGARALEALLTDAGELRGPPLQLDTGQLVKIAKRGGVTAMEAVHASRNALTGAPLNLTPDQVVAIASNGGGKQALETVQRLLPVLCQDHGLTPEQVVAIASNNGGKQALETVQRLLPVLCQAHGLTPDQVVAIASHDGGKQALETVQRLLPVLCQAHGLTPAQVVAIASNNGGKQALETVQRLLPVLCQDHGLTPDQVVAIASHDGGKQALETVQRLLPVLCQDHGLTPEQVVAIASNNGGKQALETVQRLLPVLCQAHGLTPDQVVAIASNGGGKQALETVQRLLPVLCQAHGLTPAQVVAIASNIGGKQALETVQRLLPVLCQDHGLTPDQVVAIASNGGGKQALETVQRLLPVLCQDHGLTPEQVVAIASNIGGKQALETVQRLLPVLCQAHGLTPDQVVAIASNNGGKQALETVQRLLPVLCQAHGLTPAQVVAIASNGGGKQALETVQRLLPVLCQDHGLTPDQVVAIASHDGGKQALETVQRLLPVLCQDHGLTPEQVVAIASNNGGKQALETVQRLLPVLCQAHGLTPDQVVAIASHDGGKQALETVQRLLPVLCQAHGLTPAQVVAIASNNGGKQALETVQRLLPVLCQDHGLTPEQVVAIASNNGGRPALESIVAQLSRPDPALAALTNDHLVALACLGGRPAMDAVKKGLPHAPELIRSSGGSGGSGGSTNLSDIIEKETGKQLVIQESILMLPEEVEEVIGNKPESDILVHTAYDESTDENVMLLTSDAPEYKPWALVIQDSNGENKIKMLSGGSGGSGGSTNLSDIIEKETGKQLVIQESILMLPEEVEEVIGNKPESDILVHTAYDESTDENVMLLTSDAPEYKPWALVIQDSNGENKIKMLSGGSKRTADGSEFEPKKKRKV

SEQ ID NO: 105 - DNA, 309 bp, Artificial Sequence
  HTS95
tacacccgggtgggaagcggatccggatctggaagcatcaccaggaccacaaaccctcgcaatgtggtgccaaagatctacatgtccgccggctctatccctctgaccacacacatcacaaacagcatccagccaaccctgtggacaatcggatccatcaatggagtggcaccactggccaagtctatcaagctgggcatccctgtgaccggcagcgcctacacagaccagaccacagccatggtgcggaagaaggtgagcgtgttcatgggcagcggatctggaagcggatctagcatgaccgcggtc

SEQ ID NO: 106 - protein, 103 aa, Artificial Sequence
  HTS95
YTRVGSGSGSGSITRTTNPRNVVPKIYMSAGSIPLTTHITNSIQPTLWTIGSINGVAPLAKSIKLGIPVTGSAYTDQTTAMVRKKVSVFMGSGSGSGSSMTAV

SEQ ID NO: 107 - DNA, 4527 bp, Artificial Sequence
  BE4-135-WT
atgaagcgcaccgccgacggctctgagttcgagagccccaagaagaagcggaaggtgagctccgagacaggaccagtggcagtggaccctacactgcggagaaggatcgagcctcacgagtttgaggtgttctttgatccaagagagctgaggaaggagacatgcctgctgtacgagatcaagtggggcacatctcacaagatctggcgccactctagcaagaacaccacaaagcacgtggaagtgaatttcatcgagaagtttaccagcgagcggcacttctgccctagcacctcctgttctatcacatggtttctgagctggtccccatgcggcgagtgtagcaaggccatcaccgagttcctgtcccagcacccaaacgtgaccctggtcatctacgtggccaggctgtatcaccacatggaccagcagaacaggcagggcctgcgggatctggtgaattccggcgtgaccatccagatcatgacagcccccgagtacgattactgttggagaaacttcgtgaactacccacctggcaaggaggcacactggcctaggtacccacccctgtggatgaagctgtatgcactggagctgcacgcaggaatcctgggcctgcctccatgcctgaatatcctgcgccggaagcagccccagctgaccttctttacaatcgccctgcagagctgtcactaccagcggctgccacctcacatcctgtgggcaaccggcctgaagtctggaggatcctctggaggaagctccggaagcgagacaccaggcacatctgagagcgccacaccagagtctagcggcggctcctctggaggatcctacacccgggtgggaagcggatccggatctggaagcatcaccaggaccacaaaccctcgcaatgtggtgccaaagatctacatgtccgccggctctatccctctgaccacacacatcacaaacagcatccagccaaccctgtggacaatcggatccatcaatggagtggcaccactggccaagtctatcaagctgggcatccctgtgaccggcagcgcctacacagaccagaccacagccatggtgcggaagaaggtgagcgtgttcatgggcagcggatctggaagcggatctagcatgaccgcggtcatggactataaggaccacgacggagactacaaggatcatgatattgattacaaagacgatgacgataagatggccccaaagaagaagcggaaggtcggtatccacggagtcccagcagccgtagatttgagaactttgggatattcacagcagcagcaggaaaagatcaagcccaaagtgaggtcgacagtcgcgcagcatcacgaagcgctggtgggtcatgggtttacacatgcccacatcgtagccttgtcgcagcaccctgcagcccttggcacggtcgccgtcaagtaccaggacatgattgcggcgttgccggaagccacacatgaggcgatcgtcggtgtggggaaacagtggagcggagcccgagcgcttgaggccctgttgacggtcgcgggagagctgagagggcctccccttcagctggacacgggccagttgctgaagatcgcgaagcggggaggagtcacggcggtcgaggcggtacacgcgtggcgcaatgcgctcacgggagcacccctcaacctgaccccagaccaggttgtggccatcgccagcaacataggtggcaagcaggccctcgaaaccgtccagagactgttaccggttctctgccaggaccacggcctgaccccggaacaggtggttgcaatcgcgtcacacgatgggggaaagcaggccctagaaaccgttcagcgactcctgcccgtcctgtgccaggcccacggcctgaccccagaccaggttgtggccatcgccagcaacataggtggcaagcaggccctcgaaaccgtccagagactgttaccggttctctgccaggcccacggcctgaccccagcccaagttgtcgcgattgcaagcaacaacggaggcaaacaagccttagaaacagtccagagattgttgccggtgctgtgccaagaccacggcctgaccccagaccaggttgtggccatcgccagcaacataggtggcaagcaggccctcgaaaccgtccagagactgttaccggttctctgccaggaccacggcctgaccccagaacaggttgtggccatcgccagcaacataggtggcaagcaggccctcgaaaccgtccagagactgttaccggttctctgccaggcccacggcctgaccccagaccaagttgtcgcgattgcaagcaacaacggaggcaaacaagccttagaaacagtccagagattgttgcctgtgctgtgccaagcccacggcctgaccccggcccaggtggttgcaatcgcgtcacacgatgggggaaagcaggccctagaaaccgttcagcgactcctgcccgtcctgtgccaggaccacggcctgaccccagaccaagttgtcgcgattgcaagcaacaacggaggcaaacaagccttagaaacagtccagagattgttgccggtgctgtgccaagaccacggcctgaccccagaacaagttgtcgcgattgcaagcaacaacggaggcaaacaagccttagaaacagtccagagattgttgccggtgctgtgccaagcccacggcctgaccccagaccaagttgtcgcgattgcaagcaacaacggaggcaaacaagccttagaaacagtccagagattgttgcctgtgctgtgccaagcccacggcctgaccccggcccaggtggttgcaatcgcgtcacacgatgggggaaagcaggccctagaaaccgttcagcgactcctgcccgtcctgtgccaggaccacggcctgaccccagaccaggttgtggccatcgccagcaacataggtggcaagcaggccctcgaaaccgtccagagactgttaccggttctctgccaggaccacggcctgaccccagaacaggttgtggccatcgccagcaacataggtggcaagcaggccctcgaaaccgtccagagactgttaccggttctctgccaggcccacggcctgaccccagaccaggttgtggccatcgccagcaacataggtggcaagcaggccctcgaaaccgtccagagactgttaccggttctctgccaggcccacggcctgaccccagcccaagttgtcgcgattgcaagcaacaacggaggcaaacaagccttagaaacagtccagagattgttgccggtgctgtgccaagaccacggcctgacccctgagcaggtagtggctattgcatccaacaacgggggcagacccgcactggagtcaatcgtggcccagctctcgaggccggaccccgcgctggccgcactcactaatgatcatcttgtagcgctggcctgcctcggcggacgacccgccttggatgcggtgaagaaggggctcccgcacgcgcctgcattgattaagcggaccaacagaaggatccccgagaggacatcacatcgagtggcagatcacgcgcaagtggtccgcgtgctcggattcttccagtgtcactcccaccccgcacaagcgttcgatgacgccatgactcaatttggtatgtcgagacacggactgctgcagctctttcgtagagtcggtgtcacagaactggaggcccgctcgggcacactgcctcccgcctcccagcggtgggacaggattctccaagcgagcggtatgaaacgcgcgaagccttcacctacgtcaactcagacacctgaccaggcgagccttcatgcgttcgcagactcgctggagagggatttggacgcgccctcgcccatgcatgaaggggaccaaactcgcgcgtcagccagctccggaggatctggaggaagcggaggatccaccaacctgtctgacatcatcgagaaggagacaggcaagcagctggtcatccaggagagcatcctgatgctgcccgaggaggtggaggaagtgatcggcaacaagcctgagtccgatatcctggtgcacaccgcctacgacgagtccacagatgagaatgtgatgctgctgacctctgacgccccagagtataagccctgggccctggtcatccaggatagcaacggcgagaataagatcaagatgctgtccggcggaagcggaggatccggaggctctaccaatctgtccgatattattgaaaaagagacaggcaagcaactggtcatccaggagtctatcctgatgctgccagaagaagtcgaagaagtgatcggaaacaagcccgaaagcgacatcctggtccatactgcctacgacgagagtaccgacgaaaatgtgatgttactgacctccgacgcccctgagtataagccatgggctctggtcatccaggactccaatggagaaaataagatcaagatgttaagcggcggctccaagagaacagccgacggctccgagttcgagcccaagaagaagcggaaagtg

SEQ ID NO: 108 - protein, 1509 aa, Artificial Sequence
  BE4-135-WT
MKRTADGSEFESPKKKRKVSSETGPVAVDPTLRRRIEPHEFEVFFDPRELRKETCLLYEIKWGTSHKIWRHSSKNTTKHVEVNFIEKFTSERHFCPSTSCSITWFLSWSPCGECSKAITEFLSQHPNVTLVIYVARLYHHMDQQNRQGLRDLVNSGVTIQIMTAPEYDYCWRNFVNYPPGKEAHWPRYPPLWMKLYALELHAGILGLPPCLNILRRKQPQLTFFTIALQSCHYQRLPPHILWATGLKSGGSSGGSSGSETPGTSESATPESSGGSSGGSYTRVGSGSGSGSITRTTNPRNVVPKIYMSAGSIPLTTHITNSIQPTLWTIGSINGVAPLAKSIKLGIPVTGSAYTDQTTAMVRKKVSVFMGSGSGSGSSMTAVMDYKDHDGDYKDHDIDYKDDDDKMAPKKKRKVGIHGVPAAVDLRTLGYSQQQQEKIKPKVRSTVAQHHEALVGHGFTHAHIVALSQHPAALGTVAVKYQDMIAALPEATHEAIVGVGKQWSGARALEALLTVAGELRGPPLQLDTGQLLKIAKRGGVTAVEAVHAWRNALTGAPLNLTPDQVVAIASNIGGKQALETVQRLLPVLCQDHGLTPEQVVAIASHDGGKQALETVQRLLPVLCQAHGLTPDQVVAIASNIGGKQALETVQRLLPVLCQAHGLTPAQVVAIASNNGGKQALETVQRLLPVLCQDHGLTPDQVVAIASNIGGKQALETVQRLLPVLCQDHGLTPEQVVAIASNIGGKQALETVQRLLPVLCQAHGLTPDQVVAIASNNGGKQALETVQRLLPVLCQAHGLTPAQVVAIASHDGGKQALETVQRLLPVLCQDHGLTPDQVVAIASNNGGKQALETVQRLLPVLCQDHGLTPEQVVAIASNNGGKQALETVQRLLPVLCQAHGLTPDQVVAIASNNGGKQALETVQRLLPVLCQAHGLTPAQVVAIASHDGGKQALETVQRLLPVLCQDHGLTPDQVVAIASNIGGKQALETVQRLLPVLCQDHGLTPEQVVAIASNIGGKQALETVQRLLPVLCQAHGLTPDQVVAIASNIGGKQALETVQRLLPVLCQAHGLTPAQVVAIASNNGGKQALETVQRLLPVLCQDHGLTPEQVVAIASNNGGRPALESIVAQLSRPDPALAALTNDHLVALACLGGRPALDAVKKGLPHAPALIKRTNRRIPERTSHRVADHAQVVRVLGFFQCHSHPAQAFDDAMTQFGMSRHGLLQLFRRVGVTELEARSGTLPPASQRWDRILQASGMKRAKPSPTSTQTPDQASLHAFADSLERDLDAPSPMHEGDQTRASASSGGSGGSGGSTNLSDIIEKETGKQLVIQESILMLPEEVEEVIGNKPESDILVHTAYDESTDENVMLLTSDAPEYKPWALVIQDSNGENKIKMLSGGSGGSGGSTNLSDIIEKETGKQLVIQESILMLPEEVEEVIGNKPESDILVHTAYDESTDENVMLLTSDAPEYKPWALVIQDSNGENKIKMLSGGSKRTADGSEFEPKKKRKV

SEQ ID NO: 109 - DNA, 4527 bp, Artificial Sequence
  BE4-135-WT-NC
atgaagcgcaccgccgacggctctgagttcgagagccccaagaagaagcggaaggtgagctccgagacaggaccagtggcagtggaccctacactgcggagaaggatcgagcctcacgagtttgaggtgttctttgatccaagagagctgaggaaggagacatgcctgctgtacgagatcaagtggggcacatctcacaagatctggcgccactctagcaagaacaccacaaagcacgtggaagtgaatttcatcgagaagtttaccagcgagcggcacttctgccctagcacctcctgttctatcacatggtttctgagctggtccccatgcggcgagtgtagcaaggccatcaccgagttcctgtcccagcacccaaacgtgaccctggtcatctacgtggccaggctgtatcaccacatggaccagcagaacaggcagggcctgcgggatctggtgaattccggcgtgaccatccagatcatgacagcccccgagtacgattactgttggagaaacttcgtgaactacccacctggcaaggaggcacactggcctaggtacccacccctgtggatgaagctgtatgcactggagctgcacgcaggaatcctgggcctgcctccatgcctgaatatcctgcgccggaagcagccccagctgaccttctttacaatcgccctgcagagctgtcactaccagcggctgccacctcacatcctgtgggcaaccggcctgaagtctggaggatcctctggaggaagctccggaagcgagacaccaggcacatctgagagcgccacaccagagtctagcggcggctcctctggaggatcctacacccgggtgggaagcggatccggatctggaagcatcaccaggaccacaaaccctcgcaatgtggtgccaaagatctacatgtccgccggctctatccctctgaccacacacatcacaaacagcatccagccaaccctgtggacaatcggatccatcaatggagtggcaccactggccaagtctatcaagctgggcatccctgtgaccggcagcgcctacacagaccagaccacagccatggtgcggaagaaggtgagcgtgttcatgggcagcggatctggaagcggatctagcatgaccgcggtcatggactataaggaccacgacggagactacaaggatcatgatattgattacaaagacgatgacgataagatggccccaaagaagaagcggaaggtcggtatccacggagtcccagcagccgtagatttgagaactttgggatattcacagcagcagcaggaaaagatcaagcccaaagtgaggtcgacagtcgcgcagcatcacgaagcgctggtgggtcatgggtttacacatgcccacatcgtagccttgtcgcagcaccctgcagcccttggcacggtcgccgtcaagtaccaggacatgattgcggcgttgccggaagccacacatgaggcgatcgtcggtgtggggaaacagtggagcggagcccgagcgcttgaggccctgttgacggtcgcgggagagctgagagggcctccccttcagctggacacgggccagttgctgaagatcgcgaagcggggaggagtcacggcggtcgaggcggtacacgcgtggcgcaatgcgctcacgggagcacccctcaacctgacccccgaccaggttgtcgctattgctagtaacggcggaggcaaacaggcgctggaaacagttcagcgcctcttgccggtcttgtgtcaggaccacggcctgaccccagaacaagttgtcgcgattgcaagcaacaacggaggcaaacaagccttagaaacagtccagagattgttgccggtgctgtgccaagcccacggcctgaccccggaccaggtggttgcaatcgcgtcacacgatgggggaaagcaggccctagaaaccgttcagcgactcctgcccgtcctgtgccaggcccacggcctgaccccagcccaagttgtcgcgattgcaagcaacaacggaggcaaacaagccttagaaacagtccagagattgttgccggtgctgtgccaagaccacggcctgaccccggaccaggtggttgcaatcgcgtcacacgatgggggaaagcaggccctagaaaccgttcagcgactcctgcccgtcctgtgccaggaccacggcctgaccccagaacaagttgtcgcgattgcaagcaacaacggaggcaaacaagccttagaaacagtccagagattgttgccggtgctgtgccaagcccacggcctgacccccgaccaggttgtcgctattgctagtaacggcggaggcaaacaggcgctggaaacagttcagcgcctcttgccggtcttgtgtcaggcccacggcctgaccccagcccaggttgtggccatcgccagcaacataggtggcaagcaggccctcgaaaccgtccagagactgttaccggttctctgccaggaccacggcctgacccccgaccaggttgtcgctattgctagtaacggcggaggcaaacaggcgctggaaacagttcagcgcctcttgccggtcttgtgtcaggaccacggcctgaccccagaacaggttgtggccatcgccagcaacataggtggcaagcaggccctcgaaaccgtccagagactgttaccggttctctgccaggcccacggcctgaccccagaccaagttgtcgcgattgcaagcaacaacggaggcaaacaagccttagaaacagtccagagattgttgcctgtgctgtgccaagcccacggcctgacccccgcccaggttgtcgctattgctagtaacggcggaggcaaacaggcgctggaaacagttcagcgcctcttgccggtcttgtgtcaggaccacggcctgaccccggaccaggtggttgcaatcgcgtcacacgatgggggaaagcaggccctagaaaccgttcagcgactcctgcccgtcctgtgccaggaccacggcctgaccccagaacaagttgtcgcgattgcaagcaacaacggaggcaaacaagccttagaaacagtccagagattgttgccggtgctgtgccaagcccacggcctgaccccggaccaggtggttgcaatcgcgtcacacgatgggggaaagcaggccctagaaaccgttcagcgactcctgcccgtcctgtgccaggcccacggcctgaccccagcccaagttgtcgcgattgcaagcaacaacggaggcaaacaagccttagaaacagtccagagattgttgccggtgctgtgccaagaccacggcctgacccctgagcaggtagtggctattgcatccaacaacgggggcagacccgcactggagtcaatcgtggcccagctctcgaggccggaccccgcgctggccgcactcactaatgatcatcttgtagcgctggcctgcctcggcggacgacccgccttggatgcggtgaagaaggggctcccgcacgcgcctgcattgattaagcggaccaacagaaggatccccgagaggacatcacatcgagtggcagatcacgcgcaagtggtccgcgtgctcggattcttccagtgtcactcccaccccgcacaagcgttcgatgacgccatgactcaatttggtatgtcgagacacggactgctgcagctctttcgtagagtcggtgtcacagaactggaggcccgctcgggcacactgcctcccgcctcccagcggtgggacaggattctccaagcgagcggtatgaaacgcgcgaagccttcacctacgtcaactcagacacctgaccaggcgagccttcatgcgttcgcagactcgctggagagggatttggacgcgccctcgcccatgcatgaaggggaccaaactcgcgcgtcagccagctccggaggatctggaggaagcggaggatccaccaacctgtctgacatcatcgagaaggagacaggcaagcagctggtcatccaggagagcatcctgatgctgcccgaggaggtggaggaagtgatcggcaacaagcctgagtccgatatcctggtgcacaccgcctacgacgagtccacagatgagaatgtgatgctgctgacctctgacgccccagagtataagccctgggccctggtcatccaggatagcaacggcgagaataagatcaagatgctgtccggcggaagcggaggatccggaggctctaccaatctgtccgatattattgaaaaagagacaggcaagcaactggtcatccaggagtctatcctgatgctgccagaagaagtcgaagaagtgatcggaaacaagcccgaaagcgacatcctggtccatactgcctacgacgagagtaccgacgaaaatgtgatgttactgacctccgacgcccctgagtataagccatgggctctggtcatccaggactccaatggagaaaataagatcaagatgttaagcggcggctccaagagaacagccgacggctccgagttcgagcccaagaagaagcggaaagtg

SEQ ID NO: 110 - protein, 1509 aa, Artificial Sequence
  BE4-135-WT-NC
MKRTADGSEFESPKKKRKVSSETGPVAVDPTLRRRIEPHEFEVFFDPRELRKETCLLYEIKWGTSHKIWRHSSKNTTKHVEVNFIEKFTSERHFCPSTSCSITWFLSWSPCGECSKAITEFLSQHPNVTLVIYVARLYHHMDQQNRQGLRDLVNSGVTIQIMTAPEYDYCWRNFVNYPPGKEAHWPRYPPLWMKLYALELHAGILGLPPCLNILRRKQPQLTFFTIALQSCHYQRLPPHILWATGLKSGGSSGGSSGSETPGTSESATPESSGGSSGGSYTRVGSGSGSGSITRTTNPRNVVPKIYMSAGSIPLTTHITNSIQPTLWTIGSINGVAPLAKSIKLGIPVTGSAYTDQTTAMVRKKVSVFMGSGSGSGSSMTAVMDYKDHDGDYKDHDIDYKDDDDKMAPKKKRKVGIHGVPAAVDLRTLGYSQQQQEKIKPKVRSTVAQHHEALVGHGFTHAHIVALSQHPAALGTVAVKYQDMIAALPEATHEAIVGVGKQWSGARALEALLTVAGELRGPPLQLDTGQLLKIAKRGGVTAVEAVHAWRNALTGAPLNLTPDQVVAIASNGGGKQALETVQRLLPVLCQDHGLTPEQVVAIASNNGGKQALETVQRLLPVLCQAHGLTPDQVVAIASHDGGKQALETVQRLLPVLCQAHGLTPAQVVAIASNNGGKQALETVQRLLPVLCQDHGLTPDQVVAIASHDGGKQALETVQRLLPVLCQDHGLTPEQVVAIASNNGGKQALETVQRLLPVLCQAHGLTPDQVVAIASNGGGKQALETVQRLLPVLCQAHGLTPAQVVAIASNIGGKQALETVQRLLPVLCQDHGLTPDQVVAIASNGGGKQALETVQRLLPVLCQDHGLTPEQVVAIASNIGGKQALETVQRLLPVLCQAHGLTPDQVVAIASNNGGKQALETVQRLLPVLCQAHGLTPAQVVAIASNGGGKQALETVQRLLPVLCQDHGLTPDQVVAIASHDGGKQALETVQRLLPVLCQDHGLTPEQVVAIASNNGGKQALETVQRLLPVLCQAHGLTPDQVVAIASHDGGKQALETVQRLLPVLCQAHGLTPAQVVAIASNNGGKQALETVQRLLPVLCQDHGLTPEQVVAIASNNGGRPALESIVAQLSRPDPALAALTNDHLVALACLGGRPALDAVKKGLPHAPALIKRTNRRIPERTSHRVADHAQVVRVLGFFQCHSHPAQAFDDAMTQFGMSRHGLLQLFRRVGVTELEARSGTLPPASQRWDRILQASGMKRAKPSPTSTQTPDQASLHAFADSLERDLDAPSPMHEGDQTRASASSGGSGGSGGSTNLSDIIEKETGKQLVIQESILMLPEEVEEVIGNKPESDILVHTAYDESTDENVMLLTSDAPEYKPWALVIQDSNGENKIKMLSGGSGGSGGSTNLSDIIEKETGKQLVIQESILMLPEEVEEVIGNKPESDILVHTAYDESTDENVMLLTSDAPEYKPWALVIQDSNGENKIKMLSGGSKRTADGSEFEPKKKRKV

SEQ ID NO: 111 - DNA, 4182 bp, Artificial Sequence
  BE4-135-63
atgaagcgcaccgccgacggctctgagttcgagagccccaagaagaagcggaaggtgagctccgagacaggaccagtggcagtggaccctacactgcggagaaggatcgagcctcacgagtttgaggtgttctttgatccaagagagctgaggaaggagacatgcctgctgtacgagatcaagtggggcacatctcacaagatctggcgccactctagcaagaacaccacaaagcacgtggaagtgaatttcatcgagaagtttaccagcgagcggcacttctgccctagcacctcctgttctatcacatggtttctgagctggtccccatgcggcgagtgtagcaaggccatcaccgagttcctgtcccagcacccaaacgtgaccctggtcatctacgtggccaggctgtatcaccacatggaccagcagaacaggcagggcctgcgggatctggtgaattccggcgtgaccatccagatcatgacagcccccgagtacgattactgttggagaaacttcgtgaactacccacctggcaaggaggcacactggcctaggtacccacccctgtggatgaagctgtatgcactggagctgcacgcaggaatcctgggcctgcctccatgcctgaatatcctgcgccggaagcagccccagctgaccttctttacaatcgccctgcagagctgtcactaccagcggctgccacctcacatcctgtgggcaaccggcctgaagtctggaggatcctctggaggaagctccggaagcgagacaccaggcacatctgagagcgccacaccagagtctagcggcggctcctctggaggatcctacacccgggtgggaagcggatccggatctggaagcatcaccaggaccacaaaccctcgcaatgtggtgccaaagatctacatgtccgccggctctatccctctgaccacacacatcacaaacagcatccagccaaccctgtggacaatcggatccatcaatggagtggcaccactggccaagtctatcaagctgggcatccctgtgaccggcagcgcctacacagaccagaccacagccatggtgcggaagaaggtgagcgtgttcatgggcagcggatctggaagcggatctagcatgaccgcggtcatggactataaggaccacgacggagactacaaggatcatgatattgattacaaagacgatgacgataagatggccccaaagaagaagcggaaggtcggtatccacggagtcccagcagccgtagatttgagaactttgggatattcacagcagcagcaggaaaagatcaagcccaaagtgaggtcgacagtcgcgcagcatcacgaagcgctggtgggtcatgggtttacacatgcccacatcgtagccttgtcgcagcaccctgcagcccttggcacggtcgccgtcaagtaccaggacatgattgcggcgttgccggaagccacacatgaggcgatcgtcggtgtggggaaacagtggagcggagcccgagcgcttgaggccctgttgacggtcgcgggagagctgagagggcctccccttcagctggacacgggccagttgctgaagatcgcgaagcggggaggagtcacggcggtcgaggcggtacacgcgtggcgcaatgcgctcacgggagcacccctcaacctgaccccagaccaggttgtggccatcgccagcaacataggtggcaagcaggccctcgaaaccgtccagagactgttaccggttctctgccaggaccacggcctgaccccggaacaggtggttgcaatcgcgtcacacgatgggggaaagcaggccctagaaaccgttcagcgactcctgcccgtcctgtgccaggcccacggcctgaccccagaccaggttgtggccatcgccagcaacataggtggcaagcaggccctcgaaaccgtccagagactgttaccggttctctgccaggcccacggcctgaccccagcccaagttgtcgcgattgcaagcaacaacggaggcaaacaagccttagaaacagtccagagattgttgccggtgctgtgccaagaccacggcctgaccccagaccaggttgtggccatcgccagcaacataggtggcaagcaggccctcgaaaccgtccagagactgttaccggttctctgccaggaccacggcctgaccccagaacaggttgtggccatcgccagcaacataggtggcaagcaggccctcgaaaccgtccagagactgttaccggttctctgccaggcccacggcctgaccccagaccaagttgtcgcgattgcaagcaacaacggaggcaaacaagccttagaaacagtccagagattgttgcctgtgctgtgccaagcccacggcctgaccccggcccaggtggttgcaatcgcgtcacacgatgggggaaagcaggccctagaaaccgttcagcgactcctgcccgtcctgtgccaggaccacggcctgaccccagaccaagttgtcgcgattgcaagcaacaacggaggcaaacaagccttagaaacagtccagagattgttgccggtgctgtgccaagaccacggcctgaccccagaacaagttgtcgcgattgcaagcaacaacggaggcaaacaagccttagaaacagtccagagattgttgccggtgctgtgccaagcccacggcctgaccccagaccaagttgtcgcgattgcaagcaacaacggaggcaaacaagccttagaaacagtccagagattgttgcctgtgctgtgccaagcccacggcctgaccccggcccaggtggttgcaatcgcgtcacacgatgggggaaagcaggccctagaaaccgttcagcgactcctgcccgtcctgtgccaggaccacggcctgaccccagaccaggttgtggccatcgccagcaacataggtggcaagcaggccctcgaaaccgtccagagactgttaccggttctctgccaggaccacggcctgaccccagaacaggttgtggccatcgccagcaacataggtggcaagcaggccctcgaaaccgtccagagactgttaccggttctctgccaggcccacggcctgaccccagaccaggttgtggccatcgccagcaacataggtggcaagcaggccctcgaaaccgtccagagactgttaccggttctctgccaggcccacggcctgaccccagcccaagttgtcgcgattgcaagcaacaacggaggcaaacaagccttagaaacagtccagagattgttgccggtgctgtgccaagaccacggcctgacccctgagcaggtagtggctattgcatccaacaacgggggcagacccgcactggagtcaatcgtggcccagctttcgaggccggaccccgcgctggccgcactcactaatgatcatcttgtagcgctggcctgcctcggcggacgacccgccttggatgcggtgaagaaggggctcccgcacgcgcctgcattgattaagcggaccaacagaaggatccccgagaggacatcacatcgagtggcaggttcctccggaggatctggaggaagcggaggatccaccaacctgtctgacatcatcgagaaggagacaggcaagcagctggtcatccaggagagcatcctgatgctgcccgaggaggtggaggaagtgatcggcaacaagcctgagtccgatatcctggtgcacaccgcctacgacgagtccacagatgagaatgtgatgctgctgacctctgacgccccagagtataagccctgggccctggtcatccaggatagcaacggcgagaataagatcaagatgctgtccggcggaagcggaggatccggaggctctaccaatctgtccgatattattgaaaaagagacaggcaagcaactggtcatccaggagtctatcctgatgctgccagaagaagtcgaagaagtgatcggaaacaagcccgaaagcgacatcctggtccatactgcctacgacgagagtaccgacgaaaatgtgatgttactgacctccgacgcccctgagtataagccatgggctctggtcatccaggactccaatggagaaaataagatcaagatgttaagcggcggctccaagagaacagccgacggctccgagttcgagcccaagaagaagcggaaagtg

SEQ ID NO: 112 - protein, 1394 aa, Artificial Sequence
  BE4-135-63
MKRTADGSEFESPKKKRKVSSETGPVAVDPTLRRRIEPHEFEVFFDPRELRKETCLLYEIKWGTSHKIWRHSSKNTTKHVEVNFIEKFTSERHFCPSTSCSITWFLSWSPCGECSKAITEFLSQHPNVTLVIYVARLYHHMDQQNRQGLRDLVNSGVTIQIMTAPEYDYCWRNFVNYPPGKEAHWPRYPPLWMKLYALELHAGILGLPPCLNILRRKQPQLTFFTIALQSCHYQRLPPHILWATGLKSGGSSGGSSGSETPGTSESATPESSGGSSGGSYTRVGSGSGSGSITRTTNPRNVVPKIYMSAGSIPLTTHITNSIQPTLWTIGSINGVAPLAKSIKLGIPVTGSAYTDQTTAMVRKKVSVFMGSGSGSGSSMTAVMDYKDHDGDYKDHDIDYKDDDDKMAPKKKRKVGIHGVPAAVDLRTLGYSQQQQEKIKPKVRSTVAQHHEALVGHGFTHAHIVALSQHPAALGTVAVKYQDMIAALPEATHEAIVGVGKQWSGARALEALLTVAGELRGPPLQLDTGQLLKIAKRGGVTAVEAVHAWRNALTGAPLNLTPDQVVAIASNIGGKQALETVQRLLPVLCQDHGLTPEQVVAIASHDGGKQALETVQRLLPVLCQAHGLTPDQVVAIASNIGGKQALETVQRLLPVLCQAHGLTPAQVVAIASNNGGKQALETVQRLLPVLCQDHGLTPDQVVAIASNIGGKQALETVQRLLPVLCQDHGLTPEQVVAIASNIGGKQALETVQRLLPVLCQAHGLTPDQVVAIASNNGGKQALETVQRLLPVLCQAHGLTPAQVVAIASHDGGKQALETVQRLLPVLCQDHGLTPDQVVAIASNNGGKQALETVQRLLPVLCQDHGLTPEQVVAIASNNGGKQALETVQRLLPVLCQAHGLTPDQVVAIASNNGGKQALETVQRLLPVLCQAHGLTPAQVVAIASHDGGKQALETVQRLLPVLCQDHGLTPDQVVAIASNIGGKQALETVQRLLPVLCQDHGLTPEQVVAIASNIGGKQALETVQRLLPVLCQAHGLTPDQVVAIASNIGGKQALETVQRLLPVLCQAHGLTPAQVVAIASNNGGKQALETVQRLLPVLCQDHGLTPEQVVAIASNNGGRPALESIVAQLSRPDPALAALTNDHLVALACLGGRPALDAVKKGLPHAPALIKRTNRRIPERTSHRVAGSSGGSGGSGGSTNLSDIIEKETGKQLVIQESILMLPEEVEEVIGNKPESDILVHTAYDESTDENVMLLTSDAPEYKPWALVIQDSNGENKIKMLSGGSGGSGGSTNLSDIIEKETGKQLVIQESILMLPEEVEEVIGNKPESDILVHTAYDESTDENVMLLTSDAPEYKPWALVIQDSNGENKIKMLSGGSKRTADGSEFEPKKKRKV

SEQ ID NO: 113 - DNA, 4182 bp, Artificial Sequence
  BE4-135-63-NC
atgaagcgcaccgccgacggctctgagttcgagagccccaagaagaagcggaaggtgagctccgagacaggaccagtggcagtggaccctacactgcggagaaggatcgagcctcacgagtttgaggtgttctttgatccaagagagctgaggaaggagacatgcctgctgtacgagatcaagtggggcacatctcacaagatctggcgccactctagcaagaacaccacaaagcacgtggaagtgaatttcatcgagaagtttaccagcgagcggcacttctgccctagcacctcctgttctatcacatggtttctgagctggtccccatgcggcgagtgtagcaaggccatcaccgagttcctgtcccagcacccaaacgtgaccctggtcatctacgtggccaggctgtatcaccacatggaccagcagaacaggcagggcctgcgggatctggtgaattccggcgtgaccatccagatcatgacagcccccgagtacgattactgttggagaaacttcgtgaactacccacctggcaaggaggcacactggcctaggtacccacccctgtggatgaagctgtatgcactggagctgcacgcaggaatcctgggcctgcctccatgcctgaatatcctgcgccggaagcagccccagctgaccttctttacaatcgccctgcagagctgtcactaccagcggctgccacctcacatcctgtgggcaaccggcctgaagtctggaggatcctctggaggaagctccggaagcgagacaccaggcacatctgagagcgccacaccagagtctagcggcggctcctctggaggatcctacacccgggtgggaagcggatccggatctggaagcatcaccaggaccacaaaccctcgcaatgtggtgccaaagatctacatgtccgccggctctatccctctgaccacacacatcacaaacagcatccagccaaccctgtggacaatcggatccatcaatggagtggcaccactggccaagtctatcaagctgggcatccctgtgaccggcagcgcctacacagaccagaccacagccatggtgcggaagaaggtgagcgtgttcatgggcagcggatctggaagcggatctagcatgaccgcggtcatggactataaggaccacgacggagactacaaggatcatgatattgattacaaagacgatgacgataagatggccccaaagaagaagcggaaggtcggtatccacggagtcccagcagccgtagatttgagaactttgggatattcacagcagcagcaggaaaagatcaagcccaaagtgaggtcgacagtcgcgcagcatcacgaagcgctggtgggtcatgggtttacacatgcccacatcgtagccttgtcgcagcaccctgcagcccttggcacggtcgccgtcaagtaccaggacatgattgcggcgttgccggaagccacacatgaggcgatcgtcggtgtggggaaacagtggagcggagcccgagcgcttgaggccctgttgacggtcgcgggagagctgagagggcctccccttcagctggacacgggccagttgctgaagatcgcgaagcggggaggagtcacggcggtcgaggcggtacacgcgtggcgcaatgcgctcacgggagcacccctcaacctgacccccgaccaggttgtcgctattgctagtaacggcggaggcaaacaggcgctggaaacagttcagcgcctcttgccggtcttgtgtcaggaccacggcctgaccccagaacaagttgtcgcgattgcaagcaacaacggaggcaaacaagccttagaaacagtccagagattgttgccggtgctgtgccaagcccacggcctgaccccggaccaggtggttgcaatcgcgtcacacgatgggggaaagcaggccctagaaaccgttcagcgactcctgcccgtcctgtgccaggcccacggcctgaccccagcccaagttgtcgcgattgcaagcaacaacggaggcaaacaagccttagaaacagtccagagattgttgccggtgctgtgccaagaccacggcctgaccccggaccaggtggttgcaatcgcgtcacacgatgggggaaagcaggccctagaaaccgttcagcgactcctgcccgtcctgtgccaggaccacggcctgaccccagaacaagttgtcgcgattgcaagcaacaacggaggcaaacaagccttagaaacagtccagagattgttgccggtgctgtgccaagcccacggcctgacccccgaccaggttgtcgctattgctagtaacggcggaggcaaacaggcgctggaaacagttcagcgcctcttgccggtcttgtgtcaggcccacggcctgaccccagcccaggttgtggccatcgccagcaacataggtggcaagcaggccctcgaaaccgtccagagactgttaccggttctctgccaggaccacggcctgacccccgaccaggttgtcgctattgctagtaacggcggaggcaaacaggcgctggaaacagttcagcgcctcttgccggtcttgtgtcaggaccacggcctgaccccagaacaggttgtggccatcgccagcaacataggtggcaagcaggccctcgaaaccgtccagagactgttaccggttctctgccaggcccacggcctgaccccagaccaagttgtcgcgattgcaagcaacaacggaggcaaacaagccttagaaacagtccagagattgttgcctgtgctgtgccaagcccacggcctgacccccgcccaggttgtcgctattgctagtaacggcggaggcaaacaggcgctggaaacagttcagcgcctcttgccggtcttgtgtcaggaccacggcctgaccccggaccaggtggttgcaatcgcgtcacacgatgggggaaagcaggccctagaaaccgttcagcgactcctgcccgtcctgtgccaggaccacggcctgaccccagaacaagttgtcgcgattgcaagcaacaacggaggcaaacaagccttagaaacagtccagagattgttgccggtgctgtgccaagcccacggcctgaccccggaccaggtggttgcaatcgcgtcacacgatgggggaaagcaggccctagaaaccgttcagcgactcctgcccgtcctgtgccaggcccacggcctgaccccagcccaagttgtcgcgattgcaagcaacaacggaggcaaacaagccttagaaacagtccagagattgttgccggtgctgtgccaagaccacggcctgacccctgagcaggtagtggctattgcatccaacaacgggggcagacccgcactggagtcaatcgtggcccagctttcgaggccggaccccgcgctggccgcactcactaatgatcatcttgtagcgctggcctgcctcggcggacgacccgccttggatgcggtgaagaaggggctcccgcacgcgcctgcattgattaagcggaccaacagaaggatccccgagaggacatcacatcgagtggcaggttcctccggaggatctggaggaagcggaggatccaccaacctgtctgacatcatcgagaaggagacaggcaagcagctggtcatccaggagagcatcctgatgctgcccgaggaggtggaggaagtgatcggcaacaagcctgagtccgatatcctggtgcacaccgcctacgacgagtccacagatgagaatgtgatgctgctgacctctgacgccccagagtataagccctgggccctggtcatccaggatagcaacggcgagaataagatcaagatgctgtccggcggaagcggaggatccggaggctctaccaatctgtccgatattattgaaaaagagacaggcaagcaactggtcatccaggagtctatcctgatgctgccagaagaagtcgaagaagtgatcggaaacaagcccgaaagcgacatcctggtccatactgcctacgacgagagtaccgacgaaaatgtgatgttactgacctccgacgcccctgagtataagccatgggctctggtcatccaggactccaatggagaaaataagatcaagatgttaagcggcggctccaagagaacagccgacggctccgagttcgagcccaagaagaagcggaaagtg

SEQ ID NO: 114 - protein, 1394 aa, Artificial Sequence
  BE4-135-63-NC
MKRTADGSEFESPKKKRKVSSETGPVAVDPTLRRRIEPHEFEVFFDPRELRKETCLLYEIKWGTSHKIWRHSSKNTTKHVEVNFIEKFTSERHFCPSTSCSITWFLSWSPCGECSKAITEFLSQHPNVTLVIYVARLYHHMDQQNRQGLRDLVNSGVTIQIMTAPEYDYCWRNFVNYPPGKEAHWPRYPPLWMKLYALELHAGILGLPPCLNILRRKQPQLTFFTIALQSCHYQRLPPHILWATGLKSGGSSGGSSGSETPGTSESATPESSGGSSGGSYTRVGSGSGSGSITRTTNPRNVVPKIYMSAGSIPLTTHITNSIQPTLWTIGSINGVAPLAKSIKLGIPVTGSAYTDQTTAMVRKKVSVFMGSGSGSGSSMTAVMDYKDHDGDYKDHDIDYKDDDDKMAPKKKRKVGIHGVPAAVDLRTLGYSQQQQEKIKPKVRSTVAQHHEALVGHGFTHAHIVALSQHPAALGTVAVKYQDMIAALPEATHEAIVGVGKQWSGARALEALLTVAGELRGPPLQLDTGQLLKIAKRGGVTAVEAVHAWRNALTGAPLNLTPDQVVAIASNGGGKQALETVQRLLPVLCQDHGLTPEQVVAIASNNGGKQALETVQRLLPVLCQAHGLTPDQVVAIASHDGGKQALETVQRLLPVLCQAHGLTPAQVVAIASNNGGKQALETVQRLLPVLCQDHGLTPDQVVAIASHDGGKQALETVQRLLPVLCQDHGLTPEQVVAIASNNGGKQALETVQRLLPVLCQAHGLTPDQVVAIASNGGGKQALETVQRLLPVLCQAHGLTPAQVVAIASNIGGKQALETVQRLLPVLCQDHGLTPDQVVAIASNGGGKQALETVQRLLPVLCQDHGLTPEQVVAIASNIGGKQALETVQRLLPVLCQAHGLTPDQVVAIASNNGGKQALETVQRLLPVLCQAHGLTPAQVVAIASNGGGKQALETVQRLLPVLCQDHGLTPDQVVAIASHDGGKQALETVQRLLPVLCQDHGLTPEQVVAIASNNGGKQALETVQRLLPVLCQAHGLTPDQVVAIASHDGGKQALETVQRLLPVLCQAHGLTPAQVVAIASNNGGKQALETVQRLLPVLCQDHGLTPEQVVAIASNNGGRPALESIVAQLSRPDPALAALTNDHLVALACLGGRPALDAVKKGLPHAPALIKRTNRRIPERTSHRVAGSSGGSGGSGGSTNLSDIIEKETGKQLVIQESILMLPEEVEEVIGNKPESDILVHTAYDESTDENVMLLTSDAPEYKPWALVIQDSNGENKIKMLSGGSGGSGGSTNLSDIIEKETGKQLVIQESILMLPEEVEEVIGNKPESDILVHTAYDESTDENVMLLTSDAPEYKPWALVIQDSNGENKIKMLSGGSKRTADGSEFEPKKKRKV

SEQ ID NO: 115 - DNA, 4173 bp, Artificial Sequence
  BE4-135-47
atgaagcgcaccgccgacggctctgagttcgagagccccaagaagaagcggaaggtgagctccgagacaggaccagtggcagtggaccctacactgcggagaaggatcgagcctcacgagtttgaggtgttctttgatccaagagagctgaggaaggagacatgcctgctgtacgagatcaagtggggcacatctcacaagatctggcgccactctagcaagaacaccacaaagcacgtggaagtgaatttcatcgagaagtttaccagcgagcggcacttctgccctagcacctcctgttctatcacatggtttctgagctggtccccatgcggcgagtgtagcaaggccatcaccgagttcctgtcccagcacccaaacgtgaccctggtcatctacgtggccaggctgtatcaccacatggaccagcagaacaggcagggcctgcgggatctggtgaattccggcgtgaccatccagatcatgacagcccccgagtacgattactgttggagaaacttcgtgaactacccacctggcaaggaggcacactggcctaggtacccacccctgtggatgaagctgtatgcactggagctgcacgcaggaatcctgggcctgcctccatgcctgaatatcctgcgccggaagcagccccagctgaccttctttacaatcgccctgcagagctgtcactaccagcggctgccacctcacatcctgtgggcaaccggcctgaagtctggaggatcctctggaggaagctccggaagcgagacaccaggcacatctgagagcgccacaccagagtctagcggcggctcctctggaggatcctacacccgggtgggaagcggatccggatctggaagcatcaccaggaccacaaaccctcgcaatgtggtgccaaagatctacatgtccgccggctctatccctctgaccacacacatcacaaacagcatccagccaaccctgtggacaatcggatccatcaatggagtggcaccactggccaagtctatcaagctgggcatccctgtgaccggcagcgcctacacagaccagaccacagccatggtgcggaagaaggtgagcgtgttcatgggcagcggatctggaagcggatctagcatgaccgcggtcatggcttcctcccctccaaagaaaaagagaaaggttgcggccgctgactacaaggatgacgacgataaaagttggaaggacgcaagtggttggtctagaatgcatgcggccccgcgacggcgtgctgcgcaaccctccgacgcttcgccggccgcgcaggtggatctacgcacgctcggctacagtcagcagcagcaagagaagatcaaaccgaaggtgcgttcgacagtggcgcagcaccacgaggcactggtgggccatgggtttacacacgcgcacatcgttgcgctcagccaacacccggcagcgttagggaccgtcgctgtcacgtatcagcacataatcacggcgttgccagaggcgacacacgaagacatcgttggcgtcggcaaacagtggtccggcgcacgcgccctggaggccttgctcacggatgcgggggagttgagaggtccgccgttacagttggacacaggccaacttgtgaagattgcaaaacgtggcggcgtgaccgcaatggaggcagtgcatgcatcgcgcaatgcgctcacgggagcacccctcaacctgaccccagaccaggttgtggccatcgccagcaacataggtggcaagcaggccctcgaaaccgtccagagactgttaccggttctctgccaggaccacggcctgaccccggaacaggtggttgcaatcgcgtcacacgatgggggaaagcaggccctagaaaccgttcagcgactcctgcccgtcctgtgccaggcccacggcctgaccccagaccaggttgtggccatcgccagcaacataggtggcaagcaggccctcgaaaccgtccagagactgttaccggttctctgccaggcccacggcctgaccccagcccaagttgtcgcgattgcaagcaacaacggaggcaaacaagccttagaaacagtccagagattgttgccggtgctgtgccaagaccacggcctgaccccagaccaggttgtggccatcgccagcaacataggtggcaagcaggccctcgaaaccgtccagagactgttaccggttctctgccaggaccacggcctgaccccagaacaggttgtggccatcgccagcaacataggtggcaagcaggccctcgaaaccgtccagagactgttaccggttctctgccaggcccacggcctgaccccagaccaagttgtcgcgattgcaagcaacaacggaggcaaacaagccttagaaacagtccagagattgttgcctgtgctgtgccaagcccacggcctgaccccggcccaggtggttgcaatcgcgtcacacgatgggggaaagcaggccctagaaaccgttcagcgactcctgcccgtcctgtgccaggaccacggcctgaccccagaccaagttgtcgcgattgcaagcaacaacggaggcaaacaagccttagaaacagtccagagattgttgccggtgctgtgccaagaccacggcctgaccccagaacaagttgtcgcgattgcaagcaacaacggaggcaaacaagccttagaaacagtccagagattgttgccggtgctgtgccaagcccacggcctgaccccagaccaagttgtcgcgattgcaagcaacaacggaggcaaacaagccttagaaacagtccagagattgttgcctgtgctgtgccaagcccacggcctgaccccggcccaggtggttgcaatcgcgtcacacgatgggggaaagcaggccctagaaaccgttcagcgactcctgcccgtcctgtgccaggaccacggcctgaccccagaccaggttgtggccatcgccagcaacataggtggcaagcaggccctcgaaaccgtccagagactgttaccggttctctgccaggaccacggcctgaccccagaacaggttgtggccatcgccagcaacataggtggcaagcaggccctcgaaaccgtccagagactgttaccggttctctgccaggcccacggcctgaccccagaccaggttgtggccatcgccagcaacataggtggcaagcaggccctcgaaaccgtccagagactgttaccggttctctgccaggcccacggcctgaccccagcccaagttgtcgcgattgcaagcaacaacggaggcaaacaagccttagaaacagtccagagattgttgccggtgctgtgccaagaccacggcctgacccctgagcaggtagtggctattgcatccaacaacgggggcagacccgcactggagtcaatcgtggcccagctttcgaggccggaccccgcgctggccgcactcactaatgatcatcttgtagcgctggcctgcctcggcggacgtcctgccatggatgcagtgaaaaagggattgccgcacgcgccggaattgatcagatcctccggaggatctggaggaagcggaggatccaccaacctgtctgacatcatcgagaaggagacaggcaagcagctggtcatccaggagagcatcctgatgctgcccgaggaggtggaggaagtgatcggcaacaagcctgagtccgatatcctggtgcacaccgcctacgacgagtccacagatgagaatgtgatgctgctgacctctgacgccccagagtataagccctgggccctggtcatccaggatagcaacggcgagaataagatcaagatgctgtccggcggaagcggaggatccggaggctctaccaatctgtccgatattattgaaaaagagacaggcaagcaactggtcatccaggagtctatcctgatgctgccagaagaagtcgaagaagtgatcggaaacaagcccgaaagcgacatcctggtccatactgcctacgacgagagtaccgacgaaaatgtgatgttactgacctccgacgcccctgagtataagccatgggctctggtcatccaggactccaatggagaaaataagatcaagatgttaagcggcggctccaagagaacagccgacggctccgagttcgagcccaagaagaagcggaaagtg

SEQ ID NO: 116 - protein, 1391 aa, Artificial Sequence
  BE4-135-47
MKRTADGSEFESPKKKRKVSSETGPVAVDPTLRRRIEPHEFEVFFDPRELRKETCLLYEIKWGTSHKIWRHSSKNTTKHVEVNFIEKFTSERHFCPSTSCSITWFLSWSPCGECSKAITEFLSQHPNVTLVIYVARLYHHMDQQNRQGLRDLVNSGVTIQIMTAPEYDYCWRNFVNYPPGKEAHWPRYPPLWMKLYALELHAGILGLPPCLNILRRKQPQLTFFTIALQSCHYQRLPPHILWATGLKSGGSSGGSSGSETPGTSESATPESSGGSSGGSYTRVGSGSGSGSITRTTNPRNVVPKIYMSAGSIPLTTHITNSIQPTLWTIGSINGVAPLAKSIKLGIPVTGSAYTDQTTAMVRKKVSVFMGSGSGSGSSMTAVMASSPPKKKRKVAAADYKDDDDKSWKDASGWSRMHAAPRRRAAQPSDASPAAQVDLRTLGYSQQQQEKIKPKVRSTVAQHHEALVGHGFTHAHIVALSQHPAALGTVAVTYQHIITALPEATHEDIVGVGKQWSGARALEALLTDAGELRGPPLQLDTGQLVKIAKRGGVTAMEAVHASRNALTGAPLNLTPDQVVAIASNIGGKQALETVQRLLPVLCQDHGLTPEQVVAIASHDGGKQALETVQRLLPVLCQAHGLTPDQVVAIASNIGGKQALETVQRLLPVLCQAHGLTPAQVVAIASNNGGKQALETVQRLLPVLCQDHGLTPDQVVAIASNIGGKQALETVQRLLPVLCQDHGLTPEQVVAIASNIGGKQALETVQRLLPVLCQAHGLTPDQVVAIASNNGGKQALETVQRLLPVLCQAHGLTPAQVVAIASHDGGKQALETVQRLLPVLCQDHGLTPDQVVAIASNNGGKQALETVQRLLPVLCQDHGLTPEQVVAIASNNGGKQALETVQRLLPVLCQAHGLTPDQVVAIASNNGGKQALETVQRLLPVLCQAHGLTPAQVVAIASHDGGKQALETVQRLLPVLCQDHGLTPDQVVAIASNIGGKQALETVQRLLPVLCQDHGLTPEQVVAIASNIGGKQALETVQRLLPVLCQAHGLTPDQVVAIASNIGGKQALETVQRLLPVLCQAHGLTPAQVVAIASNNGGKQALETVQRLLPVLCQDHGLTPEQVVAIASNNGGRPALESIVAQLSRPDPALAALTNDHLVALACLGGRPAMDAVKKGLPHAPELIRSSGGSGGSGGSTNLSDIIEKETGKQLVIQESILMLPEEVEEVIGNKPESDILVHTAYDESTDENVMLLTSDAPEYKPWALVIQDSNGENKIKMLSGGSGGSGGSTNLSDIIEKETGKQLVIQESILMLPEEVEEVIGNKPESDILVHTAYDESTDENVMLLTSDAPEYKPWALVIQDSNGENKIKMLSGGSKRTADGSEFEPKKKRKV

SEQ ID NO: 117 - DNA, 4173 bp, Artificial Sequence
  BE4-135-47-NC
atgaagcgcaccgccgacggctctgagttcgagagccccaagaagaagcggaaggtgagctccgagacaggaccagtggcagtggaccctacactgcggagaaggatcgagcctcacgagtttgaggtgttctttgatccaagagagctgaggaaggagacatgcctgctgtacgagatcaagtggggcacatctcacaagatctggcgccactctagcaagaacaccacaaagcacgtggaagtgaatttcatcgagaagtttaccagcgagcggcacttctgccctagcacctcctgttctatcacatggtttctgagctggtccccatgcggcgagtgtagcaaggccatcaccgagttcctgtcccagcacccaaacgtgaccctggtcatctacgtggccaggctgtatcaccacatggaccagcagaacaggcagggcctgcgggatctggtgaattccggcgtgaccatccagatcatgacagcccccgagtacgattactgttggagaaacttcgtgaactacccacctggcaaggaggcacactggcctaggtacccacccctgtggatgaagctgtatgcactggagctgcacgcaggaatcctgggcctgcctccatgcctgaatatcctgcgccggaagcagccccagctgaccttctttacaatcgccctgcagagctgtcactaccagcggctgccacctcacatcctgtgggcaaccggcctgaagtctggaggatcctctggaggaagctccggaagcgagacaccaggcacatctgagagcgccacaccagagtctagcggcggctcctctggaggatcctacacccgggtgggaagcggatccggatctggaagcatcaccaggaccacaaaccctcgcaatgtggtgccaaagatctacatgtccgccggctctatccctctgaccacacacatcacaaacagcatccagccaaccctgtggacaatcggatccatcaatggagtggcaccactggccaagtctatcaagctgggcatccctgtgaccggcagcgcctacacagaccagaccacagccatggtgcggaagaaggtgagcgtgttcatgggcagcggatctggaagcggatctagcatgaccgcggtcatggcttcctcccctccaaagaaaaagagaaaggttgcggccgctgactacaaggatgacgacgataaaagttggaaggacgcaagtggttggtctagaatgcatgcggccccgcgacggcgtgctgcgcaaccctccgacgcttcgccggccgcgcaggtggatctacgcacgctcggctacagtcagcagcagcaagagaagatcaaaccgaaggtgcgttcgacagtggcgcagcaccacgaggcactggtgggccatgggtttacacacgcgcacatcgttgcgctcagccaacacccggcagcgttagggaccgtcgctgtcacgtatcagcacataatcacggcgttgccagaggcgacacacgaagacatcgttggcgtcggcaaacagtggtccggcgcacgcgccctggaggccttgctcacggatgcgggggagttgagaggtccgccgttacagttggacacaggccaacttgtgaagattgcaaaacgtggcggcgtgaccgcaatggaggcagtgcatgcatcgcgcaatgcgctcacgggagcacccctcaacctgacccccgaccaggttgtcgctattgctagtaacggcggaggcaaacaggcgctggaaacagttcagcgcctcttgccggtcttgtgtcaggaccacggcctgaccccagaacaagttgtcgcgattgcaagcaacaacggaggcaaacaagccttagaaacagtccagagattgttgccggtgctgtgccaagcccacggcctgaccccggaccaggtggttgcaatcgcgtcacacgatgggggaaagcaggccctagaaaccgttcagcgactcctgcccgtcctgtgccaggcccacggcctgaccccagcccaagttgtcgcgattgcaagcaacaacggaggcaaacaagccttagaaacagtccagagattgttgccggtgctgtgccaagaccacggcctgaccccggaccaggtggttgcaatcgcgtcacacgatgggggaaagcaggccctagaaaccgttcagcgactcctgcccgtcctgtgccaggaccacggcctgaccccagaacaagttgtcgcgattgcaagcaacaacggaggcaaacaagccttagaaacagtccagagattgttgccggtgctgtgccaagcccacggcctgacccccgaccaggttgtcgctattgctagtaacggcggaggcaaacaggcgctggaaacagttcagcgcctcttgccggtcttgtgtcaggcccacggcctgaccccagcccaggttgtggccatcgccagcaacataggtggcaagcaggccctcgaaaccgtccagagactgttaccggttctctgccaggaccacggcctgacccccgaccaggttgtcgctattgctagtaacggcggaggcaaacaggcgctggaaacagttcagcgcctcttgccggtcttgtgtcaggaccacggcctgaccccagaacaggttgtggccatcgccagcaacataggtggcaagcaggccctcgaaaccgtccagagactgttaccggttctctgccaggcccacggcctgaccccagaccaagttgtcgcgattgcaagcaacaacggaggcaaacaagccttagaaacagtccagagattgttgcctgtgctgtgccaagcccacggcctgacccccgcccaggttgtcgctattgctagtaacggcggaggcaaacaggcgctggaaacagttcagcgcctcttgccggtcttgtgtcaggaccacggcctgaccccggaccaggtggttgcaatcgcgtcacacgatgggggaaagcaggccctagaaaccgttcagcgactcctgcccgtcctgtgccaggaccacggcctgaccccagaacaagttgtcgcgattgcaagcaacaacggaggcaaacaagccttagaaacagtccagagattgttgccggtgctgtgccaagcccacggcctgaccccggaccaggtggttgcaatcgcgtcacacgatgggggaaagcaggccctagaaaccgttcagcgactcctgcccgtcctgtgccaggcccacggcctgaccccagcccaagttgtcgcgattgcaagcaacaacggaggcaaacaagccttagaaacagtccagagattgttgccggtgctgtgccaagaccacggcctgacccctgagcaggtagtggctattgcatccaacaacgggggcagacccgcactggagtcaatcgtggcccagctttcgaggccggaccccgcgctggccgcactcactaatgatcatcttgtagcgctggcctgcctcggcggacgtcctgccatggatgcagtgaaaaagggattgccgcacgcgccggaattgatcagatcctccggaggatctggaggaagcggaggatccaccaacctgtctgacatcatcgagaaggagacaggcaagcagctggtcatccaggagagcatcctgatgctgcccgaggaggtggaggaagtgatcggcaacaagcctgagtccgatatcctggtgcacaccgcctacgacgagtccacagatgagaatgtgatgctgctgacctctgacgccccagagtataagccctgggccctggtcatccaggatagcaacggcgagaataagatcaagatgctgtccggcggaagcggaggatccggaggctctaccaatctgtccgatattattgaaaaagagacaggcaagcaactggtcatccaggagtctatcctgatgctgccagaagaagtcgaagaagtgatcggaaacaagcccgaaagcgacatcctggtccatactgcctacgacgagagtaccgacgaaaatgtgatgttactgacctccgacgcccctgagtataagccatgggctctggtcatccaggactccaatggagaaaataagatcaagatgttaagcggcggctccaagagaacagccgacggctccgagttcgagcccaagaagaagcggaaagtg

SEQ ID NO: 118 - protein, 1391 aa, Artificial Sequence
  BE4-135-47-NC
MKRTADGSEFESPKKKRKVSSETGPVAVDPTLRRRIEPHEFEVFFDPRELRKETCLLYEIKWGTSHKIWRHSSKNTTKHVEVNFIEKFTSERHFCPSTSCSITWFLSWSPCGECSKAITEFLSQHPNVTLVIYVARLYHHMDQQNRQGLRDLVNSGVTIQIMTAPEYDYCWRNFVNYPPGKEAHWPRYPPLWMKLYALELHAGILGLPPCLNILRRKQPQLTFFTIALQSCHYQRLPPHILWATGLKSGGSSGGSSGSETPGTSESATPESSGGSSGGSYTRVGSGSGSGSITRTTNPRNVVPKIYMSAGSIPLTTHITNSIQPTLWTIGSINGVAPLAKSIKLGIPVTGSAYTDQTTAMVRKKVSVFMGSGSGSGSSMTAVMASSPPKKKRKVAAADYKDDDDKSWKDASGWSRMHAAPRRRAAQPSDASPAAQVDLRTLGYSQQQQEKIKPKVRSTVAQHHEALVGHGFTHAHIVALSQHPAALGTVAVTYQHIITALPEATHEDIVGVGKQWSGARALEALLTDAGELRGPPLQLDTGQLVKIAKRGGVTAMEAVHASRNALTGAPLNLTPDQVVAIASNGGGKQALETVQRLLPVLCQDHGLTPEQVVAIASNNGGKQALETVQRLLPVLCQAHGLTPDQVVAIASHDGGKQALETVQRLLPVLCQAHGLTPAQVVAIASNNGGKQALETVQRLLPVLCQDHGLTPDQVVAIASHDGGKQALETVQRLLPVLCQDHGLTPEQVVAIASNNGGKQALETVQRLLPVLCQAHGLTPDQVVAIASNGGGKQALETVQRLLPVLCQAHGLTPAQVVAIASNIGGKQALETVQRLLPVLCQDHGLTPDQVVAIASNGGGKQALETVQRLLPVLCQDHGLTPEQVVAIASNIGGKQALETVQRLLPVLCQAHGLTPDQVVAIASNNGGKQALETVQRLLPVLCQAHGLTPAQVVAIASNGGGKQALETVQRLLPVLCQDHGLTPDQVVAIASHDGGKQALETVQRLLPVLCQDHGLTPEQVVAIASNNGGKQALETVQRLLPVLCQAHGLTPDQVVAIASHDGGKQALETVQRLLPVLCQAHGLTPAQVVAIASNNGGKQALETVQRLLPVLCQDHGLTPEQVVAIASNNGGRPALESIVAQLSRPDPALAALTNDHLVALACLGGRPAMDAVKKGLPHAPELIRSSGGSGGSGGSTNLSDIIEKETGKQLVIQESILMLPEEVEEVIGNKPESDILVHTAYDESTDENVMLLTSDAPEYKPWALVIQDSNGENKIKMLSGGSGGSGGSTNLSDIIEKETGKQLVIQESILMLPEEVEEVIGNKPESDILVHTAYDESTDENVMLLTSDAPEYKPWALVIQDSNGENKIKMLSGGSKRTADGSEFEPKKKRKV

SEQ ID NO: 119 - DNA, 4824 bp, Artificial Sequence
  BE4-234-WT
atgaagcgcaccgccgacggctctgagttcgagagccccaagaagaagcggaaggtgagctccgagacaggaccagtggcagtggaccctacactgcggagaaggatcgagcctcacgagtttgaggtgttctttgatccaagagagctgaggaaggagacatgcctgctgtacgagatcaagtggggcacatctcacaagatctggcgccactctagcaagaacaccacaaagcacgtggaagtgaatttcatcgagaagtttaccagcgagcggcacttctgccctagcacctcctgttctatcacatggtttctgagctggtccccatgcggcgagtgtagcaaggccatcaccgagttcctgtcccagcacccaaacgtgaccctggtcatctacgtggccaggctgtatcaccacatggaccagcagaacaggcagggcctgcgggatctggtgaattccggcgtgaccatccagatcatgacagcccccgagtacgattactgttggagaaacttcgtgaactacccacctggcaaggaggcacactggcctaggtacccacccctgtggatgaagctgtatgcactggagctgcacgcaggaatcctgggcctgcctccatgcctgaatatcctgcgccggaagcagccccagctgaccttctttacaatcgccctgcagagctgtcactaccagcggctgccacctcacatcctgtgggcaaccggcctgaagtctggaggatcctctggaggaagctccggaagcgagacaccaggcacatctgagagcgccacaccagagtctagcggcggctcctctggaggatcctacacccgggtgggaagcggatccggatctggaagcatcaccaggaccacaaaccctcgcaatgtggtgccaaagatctacatgtccgccggctctatccctctgaccacacacatcacaaacagcatccagccaaccctgtggacaatcggatccatcaatggagtggcaccactggccaagtctatcaagctgggcatccctgtgaccggcagcgcctacacagaccagaccacagccatggtgcggaagaaggtgagcgtgttcatgggcagcggatctggaagcggatctagcatgaccggggtgggaagcggatccggatctggaagcatcaccaggaccacaaaccctcgcaatgtggtgccaaagatctacatgtccgccggctctatccctctgaccacacacatcacaaacagcatccagccaaccctgtggacaatcggatccatcaatggagtggcaccactggccaagtctatcaagctgggcatccctgtgaccggcagcgcctacacagaccagaccacagccatggtgcggaagaaggtgagcgtgttcatgggcagcggatctggaagcggatctagcatgaccgcggtcatggactataaggaccacgacggagactacaaggatcatgatattgattacaaagacgatgacgataagatggccccaaagaagaagcggaaggtcggtatccacggagtcccagcagccgtagatttgagaactttgggatattcacagcagcagcaggaaaagatcaagcccaaagtgaggtcgacagtcgcgcagcatcacgaagcgctggtgggtcatgggtttacacatgcccacatcgtagccttgtcgcagcaccctgcagcccttggcacggtcgccgtcaagtaccaggacatgattgcggcgttgccggaagccacacatgaggcgatcgtcggtgtggggaaacagtggagcggagcccgagcgcttgaggccctgttgacggtcgcgggagagctgagagggcctccccttcagctggacacgggccagttgctgaagatcgcgaagcggggaggagtcacggcggtcgaggcggtacacgcgtggcgcaatgcgctcacgggagcacccctcaacctgaccccagaccaggttgtggccatcgccagcaacataggtggcaagcaggccctcgaaaccgtccagagactgttaccggttctctgccaggaccacggcctgaccccggaacaggtggttgcaatcgcgtcacacgatgggggaaagcaggccctagaaaccgttcagcgactcctgcccgtcctgtgccaggcccacggcctgaccccagaccaggttgtggccatcgccagcaacataggtggcaagcaggccctcgaaaccgtccagagactgttaccggttctctgccaggcccacggcctgaccccagcccaagttgtcgcgattgcaagcaacaacggaggcaaacaagccttagaaacagtccagagattgttgccggtgctgtgccaagaccacggcctgaccccagaccaggttgtggccatcgccagcaacataggtggcaagcaggccctcgaaaccgtccagagactgttaccggttctctgccaggaccacggcctgaccccagaacaggttgtggccatcgccagcaacataggtggcaagcaggccctcgaaaccgtccagagactgttaccggttctctgccaggcccacggcctgaccccagaccaagttgtcgcgattgcaagcaacaacggaggcaaacaagccttagaaacagtccagagattgttgcctgtgctgtgccaagcccacggcctgaccccggcccaggtggttgcaatcgcgtcacacgatgggggaaagcaggccctagaaaccgttcagcgactcctgcccgtcctgtgccaggaccacggcctgaccccagaccaagttgtcgcgattgcaagcaacaacggaggcaaacaagccttagaaacagtccagagattgttgccggtgctgtgccaagaccacggcctgaccccagaacaagttgtcgcgattgcaagcaacaacggaggcaaacaagccttagaaacagtccagagattgttgccggtgctgtgccaagcccacggcctgaccccagaccaagttgtcgcgattgcaagcaacaacggaggcaaacaagccttagaaacagtccagagattgttgcctgtgctgtgccaagcccacggcctgaccccggcccaggtggttgcaatcgcgtcacacgatgggggaaagcaggccctagaaaccgttcagcgactcctgcccgtcctgtgccaggaccacggcctgaccccagaccaggttgtggccatcgccagcaacataggtggcaagcaggccctcgaaaccgtccagagactgttaccggttctctgccaggaccacggcctgaccccagaacaggttgtggccatcgccagcaacataggtggcaagcaggccctcgaaaccgtccagagactgttaccggttctctgccaggcccacggcctgaccccagaccaggttgtggccatcgccagcaacataggtggcaagcaggccctcgaaaccgtccagagactgttaccggttctctgccaggcccacggcctgaccccagcccaagttgtcgcgattgcaagcaacaacggaggcaaacaagccttagaaacagtccagagattgttgccggtgctgtgccaagaccacggcctgacccctgagcaggtagtggctattgcatccaacaacgggggcagacccgcactggagtcaatcgtggcccagctctcgaggccggaccccgcgctggccgcactcactaatgatcatcttgtagcgctggcctgcctcggcggacgacccgccttggatgcggtgaagaaggggctcccgcacgcgcctgcattgattaagcggaccaacagaaggatccccgagaggacatcacatcgagtggcagatcacgcgcaagtggtccgcgtgctcggattcttccagtgtcactcccaccccgcacaagcgttcgatgacgccatgactcaatttggtatgtcgagacacggactgctgcagctctttcgtagagtcggtgtcacagaactggaggcccgctcgggcacactgcctcccgcctcccagcggtgggacaggattctccaagcgagcggtatgaaacgcgcgaagccttcacctacgtcaactcagacacctgaccaggcgagccttcatgcgttcgcagactcgctggagagggatttggacgcgccctcgcccatgcatgaaggggaccaaactcgcgcgtcagccagctccggaggatctggaggaagcggaggatccaccaacctgtctgacatcatcgagaaggagacaggcaagcagctggtcatccaggagagcatcctgatgctgcccgaggaggtggaggaagtgatcggcaacaagcctgagtccgatatcctggtgcacaccgcctacgacgagtccacagatgagaatgtgatgctgctgacctctgacgccccagagtataagccctgggccctggtcatccaggatagcaacggcgagaataagatcaagatgctgtccggcggaagcggaggatccggaggctctaccaatctgtccgatattattgaaaaagagacaggcaagcaactggtcatccaggagtctatcctgatgctgccagaagaagtcgaagaagtgatcggaaacaagcccgaaagcgacatcctggtccatactgcctacgacgagagtaccgacgaaaatgtgatgttactgacctccgacgcccctgagtataagccatgggctctggtcatccaggactccaatggagaaaataagatcaagatgttaagcggcggctccaagagaacagccgacggctccgagttcgagcccaagaagaagcggaaagtg

SEQ ID NO: 120 - protein, 1608 aa, Artificial Sequence
  BE4-234-WT
MKRTADGSEFESPKKKRKVSSETGPVAVDPTLRRRIEPHEFEVFFDPRELRKETCLLYEIKWGTSHKIWRHSSKNTTKHVEVNFIEKFTSERHFCPSTSCSITWFLSWSPCGECSKAITEFLSQHPNVTLVIYVARLYHHMDQQNRQGLRDLVNSGVTIQIMTAPEYDYCWRNFVNYPPGKEAHWPRYPPLWMKLYALELHAGILGLPPCLNILRRKQPQLTFFTIALQSCHYQRLPPHILWATGLKSGGSSGGSSGSETPGTSESATPESSGGSSGGSYTRVGSGSGSGSITRTTNPRNVVPKIYMSAGSIPLTTHITNSIQPTLWTIGSINGVAPLAKSIKLGIPVTGSAYTDQTTAMVRKKVSVFMGSGSGSGSSMTGVGSGSGSGSITRTTNPRNVVPKIYMSAGSIPLTTHITNSIQPTLWTIGSINGVAPLAKSIKLGIPVTGSAYTDQTTAMVRKKVSVFMGSGSGSGSSMTAVMDYKDHDGDYKDHDIDYKDDDDKMAPKKKRKVGIHGVPAAVDLRTLGYSQQQQEKIKPKVRSTVAQHHEALVGHGFTHAHIVALSQHPAALGTVAVKYQDMIAALPEATHEAIVGVGKQWSGARALEALLTVAGELRGPPLQLDTGQLLKIAKRGGVTAVEAVHAWRNALTGAPLNLTPDQVVAIASNIGGKQALETVQRLLPVLCQDHGLTPEQVVAIASHDGGKQALETVQRLLPVLCQAHGLTPDQVVAIASNIGGKQALETVQRLLPVLCQAHGLTPAQVVAIASNNGGKQALETVQRLLPVLCQDHGLTPDQVVAIASNIGGKQALETVQRLLPVLCQDHGLTPEQVVAIASNIGGKQALETVQRLLPVLCQAHGLTPDQVVAIASNNGGKQALETVQRLLPVLCQAHGLTPAQVVAIASHDGGKQALETVQRLLPVLCQDHGLTPDQVVAIASNNGGKQALETVQRLLPVLCQDHGLTPEQVVAIASNNGGKQALETVQRLLPVLCQAHGLTPDQVVAIASNNGGKQALETVQRLLPVLCQAHGLTPAQVVAIASHDGGKQALETVQRLLPVLCQDHGLTPDQVVAIASNIGGKQALETVQRLLPVLCQDHGLTPEQVVAIASNIGGKQALETVQRLLPVLCQAHGLTPDQVVAIASNIGGKQALETVQRLLPVLCQAHGLTPAQVVAIASNNGGKQALETVQRLLPVLCQDHGLTPEQVVAIASNNGGRPALESIVAQLSRPDPALAALTNDHLVALACLGGRPALDAVKKGLPHAPALIKRTNRRIPERTSHRVADHAQVVRVLGFFQCHSHPAQAFDDAMTQFGMSRHGLLQLFRRVGVTELEARSGTLPPASQRWDRILQASGMKRAKPSPTSTQTPDQASLHAFADSLERDLDAPSPMHEGDQTRASASSGGSGGSGGSTNLSDIIEKETGKQLVIQESILMLPEEVEEVIGNKPESDILVHTAYDESTDENVMLLTSDAPEYKPWALVIQDSNGENKIKMLSGGSGGSGGSTNLSDIIEKETGKQLVIQESILMLPEEVEEVIGNKPESDILVHTAYDESTDENVMLLTSDAPEYKPWALVIQDSNGENKIKMLSGGSKRTADGSEFEPKKKRKV

SEQ ID NO: 121 - DNA, 4824 bp, Artificial Sequence
  BE4-234-WT-NC
atgaagcgcaccgccgacggctctgagttcgagagccccaagaagaagcggaaggtgagctccgagacaggaccagtggcagtggaccctacactgcggagaaggatcgagcctcacgagtttgaggtgttctttgatccaagagagctgaggaaggagacatgcctgctgtacgagatcaagtggggcacatctcacaagatctggcgccactctagcaagaacaccacaaagcacgtggaagtgaatttcatcgagaagtttaccagcgagcggcacttctgccctagcacctcctgttctatcacatggtttctgagctggtccccatgcggcgagtgtagcaaggccatcaccgagttcctgtcccagcacccaaacgtgaccctggtcatctacgtggccaggctgtatcaccacatggaccagcagaacaggcagggcctgcgggatctggtgaattccggcgtgaccatccagatcatgacagcccccgagtacgattactgttggagaaacttcgtgaactacccacctggcaaggaggcacactggcctaggtacccacccctgtggatgaagctgtatgcactggagctgcacgcaggaatcctgggcctgcctccatgcctgaatatcctgcgccggaagcagccccagctgaccttctttacaatcgccctgcagagctgtcactaccagcggctgccacctcacatcctgtgggcaaccggcctgaagtctggaggatcctctggaggaagctccggaagcgagacaccaggcacatctgagagcgccacaccagagtctagcggcggctcctctggaggatcctacacccgggtgggaagcggatccggatctggaagcatcaccaggaccacaaaccctcgcaatgtggtgccaaagatctacatgtccgccggctctatccctctgaccacacacatcacaaacagcatccagccaaccctgtggacaatcggatccatcaatggagtggcaccactggccaagtctatcaagctgggcatccctgtgaccggcagcgcctacacagaccagaccacagccatggtgcggaagaaggtgagcgtgttcatgggcagcggatctggaagcggatctagcatgaccggggtgggaagcggatccggatctggaagcatcaccaggaccacaaaccctcgcaatgtggtgccaaagatctacatgtccgccggctctatccctctgaccacacacatcacaaacagcatccagccaaccctgtggacaatcggatccatcaatggagtggcaccactggccaagtctatcaagctgggcatccctgtgaccggcagcgcctacacagaccagaccacagccatggtgcggaagaaggtgagcgtgttcatgggcagcggatctggaagcggatctagcatgaccgcggtcatggactataaggaccacgacggagactacaaggatcatgatattgattacaaagacgatgacgataagatggccccaaagaagaagcggaaggtcggtatccacggagtcccagcagccgtagatttgagaactttgggatattcacagcagcagcaggaaaagatcaagcccaaagtgaggtcgacagtcgcgcagcatcacgaagcgctggtgggtcatgggtttacacatgcccacatcgtagccttgtcgcagcaccctgcagcccttggcacggtcgccgtcaagtaccaggacatgattgcggcgttgccggaagccacacatgaggcgatcgtcggtgtggggaaacagtggagcggagcccgagcgcttgaggccctgttgacggtcgcgggagagctgagagggcctccccttcagctggacacgggccagttgctgaagatcgcgaagcggggaggagtcacggcggtcgaggcggtacacgcgtggcgcaatgcgctcacgggagcacccctcaacctgacccccgaccaggttgtcgctattgctagtaacggcggaggcaaacaggcgctggaaacagttcagcgcctcttgccggtcttgtgtcaggaccacggcctgaccccagaacaagttgtcgcgattgcaagcaacaacggaggcaaacaagccttagaaacagtccagagattgttgccggtgctgtgccaagcccacggcctgaccccggaccaggtggttgcaatcgcgtcacacgatgggggaaagcaggccctagaaaccgttcagcgactcctgcccgtcctgtgccaggcccacggcctgaccccagcccaagttgtcgcgattgcaagcaacaacggaggcaaacaagccttagaaacagtccagagattgttgccggtgctgtgccaagaccacggcctgaccccggaccaggtggttgcaatcgcgtcacacgatgggggaaagcaggccctagaaaccgttcagcgactcctgcccgtcctgtgccaggaccacggcctgaccccagaacaagttgtcgcgattgcaagcaacaacggaggcaaacaagccttagaaacagtccagagattgttgccggtgctgtgccaagcccacggcctgacccccgaccaggttgtcgctattgctagtaacggcggaggcaaacaggcgctggaaacagttcagcgcctcttgccggtcttgtgtcaggcccacggcctgaccccagcccaggttgtggccatcgccagcaacataggtggcaagcaggccctcgaaaccgtccagagactgttaccggttctctgccaggaccacggcctgacccccgaccaggttgtcgctattgctagtaacggcggaggcaaacaggcgctggaaacagttcagcgcctcttgccggtcttgtgtcaggaccacggcctgaccccagaacaggttgtggccatcgccagcaacataggtggcaagcaggccctcgaaaccgtccagagactgttaccggttctctgccaggcccacggcctgaccccagaccaagttgtcgcgattgcaagcaacaacggaggcaaacaagccttagaaacagtccagagattgttgcctgtgctgtgccaagcccacggcctgacccccgcccaggttgtcgctattgctagtaacggcggaggcaaacaggcgctggaaacagttcagcgcctcttgccggtcttgtgtcaggaccacggcctgaccccggaccaggtggttgcaatcgcgtcacacgatgggggaaagcaggccctagaaaccgttcagcgactcctgcccgtcctgtgccaggaccacggcctgaccccagaacaagttgtcgcgattgcaagcaacaacggaggcaaacaagccttagaaacagtccagagattgttgccggtgctgtgccaagcccacggcctgaccccggaccaggtggttgcaatcgcgtcacacgatgggggaaagcaggccctagaaaccgttcagcgactcctgcccgtcctgtgccaggcccacggcctgaccccagcccaagttgtcgcgattgcaagcaacaacggaggcaaacaagccttagaaacagtccagagattgttgccggtgctgtgccaagaccacggcctgacccctgagcaggtagtggctattgcatccaacaacgggggcagacccgcactggagtcaatcgtggcccagctctcgaggccggaccccgcgctggccgcactcactaatgatcatcttgtagcgctggcctgcctcggcggacgacccgccttggatgcggtgaagaaggggctcccgcacgcgcctgcattgattaagcggaccaacagaaggatccccgagaggacatcacatcgagtggcagatcacgcgcaagtggtccgcgtgctcggattcttccagtgtcactcccaccccgcacaagcgttcgatgacgccatgactcaatttggtatgtcgagacacggactgctgcagctctttcgtagagtcggtgtcacagaactggaggcccgctcgggcacactgcctcccgcctcccagcggtgggacaggattctccaagcgagcggtatgaaacgcgcgaagccttcacctacgtcaactcagacacctgaccaggcgagccttcatgcgttcgcagactcgctggagagggatttggacgcgccctcgcccatgcatgaaggggaccaaactcgcgcgtcagccagctccggaggatctggaggaagcggaggatccaccaacctgtctgacatcatcgagaaggagacaggcaagcagctggtcatccaggagagcatcctgatgctgcccgaggaggtggaggaagtgatcggcaacaagcctgagtccgatatcctggtgcacaccgcctacgacgagtccacagatgagaatgtgatgctgctgacctctgacgccccagagtataagccctgggccctggtcatccaggatagcaacggcgagaataagatcaagatgctgtccggcggaagcggaggatccggaggctctaccaatctgtccgatattattgaaaaagagacaggcaagcaactggtcatccaggagtctatcctgatgctgccagaagaagtcgaagaagtgatcggaaacaagcccgaaagcgacatcctggtccatactgcctacgacgagagtaccgacgaaaatgtgatgttactgacctccgacgcccctgagtataagccatgggctctggtcatccaggactccaatggagaaaataagatcaagatgttaagcggcggctccaagagaacagccgacggctccgagttcgagcccaagaagaagcggaaagtg

SEQ ID NO: 122 - protein, 1608 aa, Artificial Sequence
  BE4-234-WT-NC
MKRTADGSEFESPKKKRKVSSETGPVAVDPTLRRRIEPHEFEVFFDPRELRKETCLLYEIKWGTSHKIWRHSSKNTTKHVEVNFIEKFTSERHFCPSTSCSITWFLSWSPCGECSKAITEFLSQHPNVTLVIYVARLYHHMDQQNRQGLRDLVNSGVTIQIMTAPEYDYCWRNFVNYPPGKEAHWPRYPPLWMKLYALELHAGILGLPPCLNILRRKQPQLTFFTIALQSCHYQRLPPHILWATGLKSGGSSGGSSGSETPGTSESATPESSGGSSGGSYTRVGSGSGSGSITRTTNPRNVVPKIYMSAGSIPLTTHITNSIQPTLWTIGSINGVAPLAKSIKLGIPVTGSAYTDQTTAMVRKKVSVFMGSGSGSGSSMTGVGSGSGSGSITRTTNPRNVVPKIYMSAGSIPLTTHITNSIQPTLWTIGSINGVAPLAKSIKLGIPVTGSAYTDQTTAMVRKKVSVFMGSGSGSGSSMTAVMDYKDHDGDYKDHDIDYKDDDDKMAPKKKRKVGIHGVPAAVDLRTLGYSQQQQEKIKPKVRSTVAQHHEALVGHGFTHAHIVALSQHPAALGTVAVKYQDMIAALPEATHEAIVGVGKQWSGARALEALLTVAGELRGPPLQLDTGQLLKIAKRGGVTAVEAVHAWRNALTGAPLNLTPDQVVAIASNGGGKQALETVQRLLPVLCQDHGLTPEQVVAIASNNGGKQALETVQRLLPVLCQAHGLTPDQVVAIASHDGGKQALETVQRLLPVLCQAHGLTPAQVVAIASNNGGKQALETVQRLLPVLCQDHGLTPDQVVAIASHDGGKQALETVQRLLPVLCQDHGLTPEQVVAIASNNGGKQALETVQRLLPVLCQAHGLTPDQVVAIASNGGGKQALETVQRLLPVLCQAHGLTPAQVVAIASNIGGKQALETVQRLLPVLCQDHGLTPDQVVAIASNGGGKQALETVQRLLPVLCQDHGLTPEQVVAIASNIGGKQALETVQRLLPVLCQAHGLTPDQVVAIASNNGGKQALETVQRLLPVLCQAHGLTPAQVVAIASNGGGKQALETVQRLLPVLCQDHGLTPDQVVAIASHDGGKQALETVQRLLPVLCQDHGLTPEQVVAIASNNGGKQALETVQRLLPVLCQAHGLTPDQVVAIASHDGGKQALETVQRLLPVLCQAHGLTPAQVVAIASNNGGKQALETVQRLLPVLCQDHGLTPEQVVAIASNNGGRPALESIVAQLSRPDPALAALTNDHLVALACLGGRPALDAVKKGLPHAPALIKRTNRRIPERTSHRVADHAQVVRVLGFFQCHSHPAQAFDDAMTQFGMSRHGLLQLFRRVGVTELEARSGTLPPASQRWDRILQASGMKRAKPSPTSTQTPDQASLHAFADSLERDLDAPSPMHEGDQTRASASSGGSGGSGGSTNLSDIIEKETGKQLVIQESILMLPEEVEEVIGNKPESDILVHTAYDESTDENVMLLTSDAPEYKPWALVIQDSNGENKIKMLSGGSGGSGGSTNLSDIIEKETGKQLVIQESILMLPEEVEEVIGNKPESDILVHTAYDESTDENVMLLTSDAPEYKPWALVIQDSNGENKIKMLSGGSKRTADGSEFEPKKKRKV

SEQ ID NO: 123 - DNA, 4479 bp, Artificial Sequence
  BE4-234-63
atgaagcgcaccgccgacggctctgagttcgagagccccaagaagaagcggaaggtgagctccgagacaggaccagtggcagtggaccctacactgcggagaaggatcgagcctcacgagtttgaggtgttctttgatccaagagagctgaggaaggagacatgcctgctgtacgagatcaagtggggcacatctcacaagatctggcgccactctagcaagaacaccacaaagcacgtggaagtgaatttcatcgagaagtttaccagcgagcggcacttctgccctagcacctcctgttctatcacatggtttctgagctggtccccatgcggcgagtgtagcaaggccatcaccgagttcctgtcccagcacccaaacgtgaccctggtcatctacgtggccaggctgtatcaccacatggaccagcagaacaggcagggcctgcgggatctggtgaattccggcgtgaccatccagatcatgacagcccccgagtacgattactgttggagaaacttcgtgaactacccacctggcaaggaggcacactggcctaggtacccacccctgtggatgaagctgtatgcactggagctgcacgcaggaatcctgggcctgcctccatgcctgaatatcctgcgccggaagcagccccagctgaccttctttacaatcgccctgcagagctgtcactaccagcggctgccacctcacatcctgtgggcaaccggcctgaagtctggaggatcctctggaggaagctccggaagcgagacaccaggcacatctgagagcgccacaccagagtctagcggcggctcctctggaggatcctacacccgggtgggaagcggatccggatctggaagcatcaccaggaccacaaaccctcgcaatgtggtgccaaagatctacatgtccgccggctctatccctctgaccacacacatcacaaacagcatccagccaaccctgtggacaatcggatccatcaatggagtggcaccactggccaagtctatcaagctgggcatccctgtgaccggcagcgcctacacagaccagaccacagccatggtgcggaagaaggtgagcgtgttcatgggcagcggatctggaagcggatctagcatgaccggggtgggaagcggatccggatctggaagcatcaccaggaccacaaaccctcgcaatgtggtgccaaagatctacatgtccgccggctctatccctctgaccacacacatcacaaacagcatccagccaaccctgtggacaatcggatccatcaatggagtggcaccactggccaagtctatcaagctgggcatccctgtgaccggcagcgcctacacagaccagaccacagccatggtgcggaagaaggtgagcgtgttcatgggcagcggatctggaagcggatctagcatgaccgcggtcatggactataaggaccacgacggagactacaaggatcatgatattgattacaaagacgatgacgataagatggccccaaagaagaagcggaaggtcggtatccacggagtcccagcagccgtagatttgagaactttgggatattcacagcagcagcaggaaaagatcaagcccaaagtgaggtcgacagtcgcgcagcatcacgaagcgctggtgggtcatgggtttacacatgcccacatcgtagccttgtcgcagcaccctgcagcccttggcacggtcgccgtcaagtaccaggacatgattgcggcgttgccggaagccacacatgaggcgatcgtcggtgtggggaaacagtggagcggagcccgagcgcttgaggccctgttgacggtcgcgggagagctgagagggcctccccttcagctggacacgggccagttgctgaagatcgcgaagcggggaggagtcacggcggtcgaggcggtacacgcgtggcgcaatgcgctcacgggagcacccctcaacctgaccccagaccaggttgtggccatcgccagcaacataggtggcaagcaggccctcgaaaccgtccagagactgttaccggttctctgccaggaccacggcctgaccccggaacaggtggttgcaatcgcgtcacacgatgggggaaagcaggccctagaaaccgttcagcgactcctgcccgtcctgtgccaggcccacggcctgaccccagaccaggttgtggccatcgccagcaacataggtggcaagcaggccctcgaaaccgtccagagactgttaccggttctctgccaggcccacggcctgaccccagcccaagttgtcgcgattgcaagcaacaacggaggcaaacaagccttagaaacagtccagagattgttgccggtgctgtgccaagaccacggcctgaccccagaccaggttgtggccatcgccagcaacataggtggcaagcaggccctcgaaaccgtccagagactgttaccggttctctgccaggaccacggcctgaccccagaacaggttgtggccatcgccagcaacataggtggcaagcaggccctcgaaaccgtccagagactgttaccggttctctgccaggcccacggcctgaccccagaccaagttgtcgcgattgcaagcaacaacggaggcaaacaagccttagaaacagtccagagattgttgcctgtgctgtgccaagcccacggcctgaccccggcccaggtggttgcaatcgcgtcacacgatgggggaaagcaggccctagaaaccgttcagcgactcctgcccgtcctgtgccaggaccacggcctgaccccagaccaagttgtcgcgattgcaagcaacaacggaggcaaacaagccttagaaacagtccagagattgttgccggtgctgtgccaagaccacggcctgaccccagaacaagttgtcgcgattgcaagcaacaacggaggcaaacaagccttagaaacagtccagagattgttgccggtgctgtgccaagcccacggcctgaccccagaccaagttgtcgcgattgcaagcaacaacggaggcaaacaagccttagaaacagtccagagattgttgcctgtgctgtgccaagcccacggcctgaccccggcccaggtggttgcaatcgcgtcacacgatgggggaaagcaggccctagaaaccgttcagcgactcctgcccgtcctgtgccaggaccacggcctgaccccagaccaggttgtggccatcgccagcaacataggtggcaagcaggccctcgaaaccgtccagagactgttaccggttctctgccaggaccacggcctgaccccagaacaggttgtggccatcgccagcaacataggtggcaagcaggccctcgaaaccgtccagagactgttaccggttctctgccaggcccacggcctgaccccagaccaggttgtggccatcgccagcaacataggtggcaagcaggccctcgaaaccgtccagagactgttaccggttctctgccaggcccacggcctgaccccagcccaagttgtcgcgattgcaagcaacaacggaggcaaacaagccttagaaacagtccagagattgttgccggtgctgtgccaagaccacggcctgacccctgagcaggtagtggctattgcatccaacaacgggggcagacccgcactggagtcaatcgtggcccagctttcgaggccggaccccgcgctggccgcactcactaatgatcatcttgtagcgctggcctgcctcggcggacgacccgccttggatgcggtgaagaaggggctcccgcacgcgcctgcattgattaagcggaccaacagaaggatccccgagaggacatcacatcgagtggcaggttcctccggaggatctggaggaagcggaggatccaccaacctgtctgacatcatcgagaaggagacaggcaagcagctggtcatccaggagagcatcctgatgctgcccgaggaggtggaggaagtgatcggcaacaagcctgagtccgatatcctggtgcacaccgcctacgacgagtccacagatgagaatgtgatgctgctgacctctgacgccccagagtataagccctgggccctggtcatccaggatagcaacggcgagaataagatcaagatgctgtccggcggaagcggaggatccggaggctctaccaatctgtccgatattattgaaaaagagacaggcaagcaactggtcatccaggagtctatcctgatgctgccagaagaagtcgaagaagtgatcggaaacaagcccgaaagcgacatcctggtccatactgcctacgacgagagtaccgacgaaaatgtgatgttactgacctccgacgcccctgagtataagccatgggctctggtcatccaggactccaatggagaaaataagatcaagatgttaagcggcggctccaagagaacagccgacggctccgagttcgagcccaagaagaagcggaaagtg

SEQ ID NO: 124 - protein, 1493 aa, Artificial Sequence
  BE4-234-63
MKRTADGSEFESPKKKRKVSSETGPVAVDPTLRRRIEPHEFEVFFDPRELRKETCLLYEIKWGTSHKIWRHSSKNTTKHVEVNFIEKFTSERHFCPSTSCSITWFLSWSPCGECSKAITEFLSQHPNVTLVIYVARLYHHMDQQNRQGLRDLVNSGVTIQIMTAPEYDYCWRNFVNYPPGKEAHWPRYPPLWMKLYALELHAGILGLPPCLNILRRKQPQLTFFTIALQSCHYQRLPPHILWATGLKSGGSSGGSSGSETPGTSESATPESSGGSSGGSYTRVGSGSGSGSITRTTNPRNVVPKIYMSAGSIPLTTHITNSIQPTLWTIGSINGVAPLAKSIKLGIPVTGSAYTDQTTAMVRKKVSVFMGSGSGSGSSMTGVGSGSGSGSITRTTNPRNVVPKIYMSAGSIPLTTHITNSIQPTLWTIGSINGVAPLAKSIKLGIPVTGSAYTDQTTAMVRKKVSVFMGSGSGSGSSMTAVMDYKDHDGDYKDHDIDYKDDDDKMAPKKKRKVGIHGVPAAVDLRTLGYSQQQQEKIKPKVRSTVAQHHEALVGHGFTHAHIVALSQHPAALGTVAVKYQDMIAALPEATHEAIVGVGKQWSGARALEALLTVAGELRGPPLQLDTGQLLKIAKRGGVTAVEAVHAWRNALTGAPLNLTPDQVVAIASNIGGKQALETVQRLLPVLCQDHGLTPEQVVAIASHDGGKQALETVQRLLPVLCQAHGLTPDQVVAIASNIGGKQALETVQRLLPVLCQAHGLTPAQVVAIASNNGGKQALETVQRLLPVLCQDHGLTPDQVVAIASNIGGKQALETVQRLLPVLCQDHGLTPEQVVAIASNIGGKQALETVQRLLPVLCQAHGLTPDQVVAIASNNGGKQALETVQRLLPVLCQAHGLTPAQVVAIASHDGGKQALETVQRLLPVLCQDHGLTPDQVVAIASNNGGKQALETVQRLLPVLCQDHGLTPEQVVAIASNNGGKQALETVQRLLPVLCQAHGLTPDQVVAIASNNGGKQALETVQRLLPVLCQAHGLTPAQVVAIASHDGGKQALETVQRLLPVLCQDHGLTPDQVVAIASNIGGKQALETVQRLLPVLCQDHGLTPEQVVAIASNIGGKQALETVQRLLPVLCQAHGLTPDQVVAIASNIGGKQALETVQRLLPVLCQAHGLTPAQVVAIASNNGGKQALETVQRLLPVLCQDHGLTPEQVVAIASNNGGRPALESIVAQLSRPDPALAALTNDHLVALACLGGRPALDAVKKGLPHAPALIKRTNRRIPERTSHRVAGSSGGSGGSGGSTNLSDIIEKETGKQLVIQESILMLPEEVEEVIGNKPESDILVHTAYDESTDENVMLLTSDAPEYKPWALVIQDSNGENKIKMLSGGSGGSGGSTNLSDIIEKETGKQLVIQESILMLPEEVEEVIGNKPESDILVHTAYDESTDENVMLLTSDAPEYKPWALVIQDSNGENKIKMLSGGSKRTADGSEFEPKKKRKV

SEQ ID NO: 125 - DNA, 4479 bp, Artificial Sequence
  BE4-234-63-NC
atgaagcgcaccgccgacggctctgagttcgagagccccaagaagaagcggaaggtgagctccgagacaggaccagtggcagtggaccctacactgcggagaaggatcgagcctcacgagtttgaggtgttctttgatccaagagagctgaggaaggagacatgcctgctgtacgagatcaagtggggcacatctcacaagatctggcgccactctagcaagaacaccacaaagcacgtggaagtgaatttcatcgagaagtttaccagcgagcggcacttctgccctagcacctcctgttctatcacatggtttctgagctggtccccatgcggcgagtgtagcaaggccatcaccgagttcctgtcccagcacccaaacgtgaccctggtcatctacgtggccaggctgtatcaccacatggaccagcagaacaggcagggcctgcgggatctggtgaattccggcgtgaccatccagatcatgacagcccccgagtacgattactgttggagaaacttcgtgaactacccacctggcaaggaggcacactggcctaggtacccacccctgtggatgaagctgtatgcactggagctgcacgcaggaatcctgggcctgcctccatgcctgaatatcctgcgccggaagcagccccagctgaccttctttacaatcgccctgcagagctgtcactaccagcggctgccacctcacatcctgtgggcaaccggcctgaagtctggaggatcctctggaggaagctccggaagcgagacaccaggcacatctgagagcgccacaccagagtctagcggcggctcctctggaggatcctacacccgggtgggaagcggatccggatctggaagcatcaccaggaccacaaaccctcgcaatgtggtgccaaagatctacatgtccgccggctctatccctctgaccacacacatcacaaacagcatccagccaaccctgtggacaatcggatccatcaatggagtggcaccactggccaagtctatcaagctgggcatccctgtgaccggcagcgcctacacagaccagaccacagccatggtgcggaagaaggtgagcgtgttcatgggcagcggatctggaagcggatctagcatgaccggggtgggaagcggatccggatctggaagcatcaccaggaccacaaaccctcgcaatgtggtgccaaagatctacatgtccgccggctctatccctctgaccacacacatcacaaacagcatccagccaaccctgtggacaatcggatccatcaatggagtggcaccactggccaagtctatcaagctgggcatccctgtgaccggcagcgcctacacagaccagaccacagccatggtgcggaagaaggtgagcgtgttcatgggcagcggatctggaagcggatctagcatgaccgcggtcatggactataaggaccacgacggagactacaaggatcatgatattgattacaaagacgatgacgataagatggccccaaagaagaagcggaaggtcggtatccacggagtcccagcagccgtagatttgagaactttgggatattcacagcagcagcaggaaaagatcaagcccaaagtgaggtcgacagtcgcgcagcatcacgaagcgctggtgggtcatgggtttacacatgcccacatcgtagccttgtcgcagcaccctgcagcccttggcacggtcgccgtcaagtaccaggacatgattgcggcgttgccggaagccacacatgaggcgatcgtcggtgtggggaaacagtggagcggagcccgagcgcttgaggccctgttgacggtcgcgggagagctgagagggcctccccttcagctggacacgggccagttgctgaagatcgcgaagcggggaggagtcacggcggtcgaggcggtacacgcgtggcgcaatgcgctcacgggagcacccctcaacctgacccccgaccaggttgtcgctattgctagtaacggcggaggcaaacaggcgctggaaacagttcagcgcctcttgccggtcttgtgtcaggaccacggcctgaccccagaacaagttgtcgcgattgcaagcaacaacggaggcaaacaagccttagaaacagtccagagattgttgccggtgctgtgccaagcccacggcctgaccccggaccaggtggttgcaatcgcgtcacacgatgggggaaagcaggccctagaaaccgttcagcgactcctgcccgtcctgtgccaggcccacggcctgaccccagcccaagttgtcgcgattgcaagcaacaacggaggcaaacaagccttagaaacagtccagagattgttgccggtgctgtgccaagaccacggcctgaccccggaccaggtggttgcaatcgcgtcacacgatgggggaaagcaggccctagaaaccgttcagcgactcctgcccgtcctgtgccaggaccacggcctgaccccagaacaagttgtcgcgattgcaagcaacaacggaggcaaacaagccttagaaacagtccagagattgttgccggtgctgtgccaagcccacggcctgacccccgaccaggttgtcgctattgctagtaacggcggaggcaaacaggcgctggaaacagttcagcgcctcttgccggtcttgtgtcaggcccacggcctgaccccagcccaggttgtggccatcgccagcaacataggtggcaagcaggccctcgaaaccgtccagagactgttaccggttctctgccaggaccacggcctgacccccgaccaggttgtcgctattgctagtaacggcggaggcaaacaggcgctggaaacagttcagcgcctcttgccggtcttgtgtcaggaccacggcctgaccccagaacaggttgtggccatcgccagcaacataggtggcaagcaggccctcgaaaccgtccagagactgttaccggttctctgccaggcccacggcctgaccccagaccaagttgtcgcgattgcaagcaacaacggaggcaaacaagccttagaaacagtccagagattgttgcctgtgctgtgccaagcccacggcctgacccccgcccaggttgtcgctattgctagtaacggcggaggcaaacaggcgctggaaacagttcagcgcctcttgccggtcttgtgtcaggaccacggcctgaccccggaccaggtggttgcaatcgcgtcacacgatgggggaaagcaggccctagaaaccgttcagcgactcctgcccgtcctgtgccaggaccacggcctgaccccagaacaagttgtcgcgattgcaagcaacaacggaggcaaacaagccttagaaacagtccagagattgttgccggtgctgtgccaagcccacggcctgaccccggaccaggtggttgcaatcgcgtcacacgatgggggaaagcaggccctagaaaccgttcagcgactcctgcccgtcctgtgccaggcccacggcctgaccccagcccaagttgtcgcgattgcaagcaacaacggaggcaaacaagccttagaaacagtccagagattgttgccggtgctgtgccaagaccacggcctgacccctgagcaggtagtggctattgcatccaacaacgggggcagacccgcactggagtcaatcgtggcccagctttcgaggccggaccccgcgctggccgcactcactaatgatcatcttgtagcgctggcctgcctcggcggacgacccgccttggatgcggtgaagaaggggctcccgcacgcgcctgcattgattaagcggaccaacagaaggatccccgagaggacatcacatcgagtggcaggttcctccggaggatctggaggaagcggaggatccaccaacctgtctgacatcatcgagaaggagacaggcaagcagctggtcatccaggagagcatcctgatgctgcccgaggaggtggaggaagtgatcggcaacaagcctgagtccgatatcctggtgcacaccgcctacgacgagtccacagatgagaatgtgatgctgctgacctctgacgccccagagtataagccctgggccctggtcatccaggatagcaacggcgagaataagatcaagatgctgtccggcggaagcggaggatccggaggctctaccaatctgtccgatattattgaaaaagagacaggcaagcaactggtcatccaggagtctatcctgatgctgccagaagaagtcgaagaagtgatcggaaacaagcccgaaagcgacatcctggtccatactgcctacgacgagagtaccgacgaaaatgtgatgttactgacctccgacgcccctgagtataagccatgggctctggtcatccaggactccaatggagaaaataagatcaagatgttaagcggcggctccaagagaacagccgacggctccgagttcgagcccaagaagaagcggaaagtg

SEQ ID NO: 126 - protein, 1493 aa, Artificial Sequence
  BE4-234-63-NC
MKRTADGSEFESPKKKRKVSSETGPVAVDPTLRRRIEPHEFEVFFDPRELRKETCLLYEIKWGTSHKIWRHSSKNTTKHVEVNFIEKFTSERHFCPSTSCSITWFLSWSPCGECSKAITEFLSQHPNVTLVIYVARLYHHMDQQNRQGLRDLVNSGVTIQIMTAPEYDYCWRNFVNYPPGKEAHWPRYPPLWMKLYALELHAGILGLPPCLNILRRKQPQLTFFTIALQSCHYQRLPPHILWATGLKSGGSSGGSSGSETPGTSESATPESSGGSSGGSYTRVGSGSGSGSITRTTNPRNVVPKIYMSAGSIPLTTHITNSIQPTLWTIGSINGVAPLAKSIKLGIPVTGSAYTDQTTAMVRKKVSVFMGSGSGSGSSMTGVGSGSGSGSITRTTNPRNVVPKIYMSAGSIPLTTHITNSIQPTLWTIGSINGVAPLAKSIKLGIPVTGSAYTDQTTAMVRKKVSVFMGSGSGSGSSMTAVMDYKDHDGDYKDHDIDYKDDDDKMAPKKKRKVGIHGVPAAVDLRTLGYSQQQQEKIKPKVRSTVAQHHEALVGHGFTHAHIVALSQHPAALGTVAVKYQDMIAALPEATHEAIVGVGKQWSGARALEALLTVAGELRGPPLQLDTGQLLKIAKRGGVTAVEAVHAWRNALTGAPLNLTPDQVVAIASNGGGKQALETVQRLLPVLCQDHGLTPEQVVAIASNNGGKQALETVQRLLPVLCQAHGLTPDQVVAIASHDGGKQALETVQRLLPVLCQAHGLTPAQVVAIASNNGGKQALETVQRLLPVLCQDHGLTPDQVVAIASHDGGKQALETVQRLLPVLCQDHGLTPEQVVAIASNNGGKQALETVQRLLPVLCQAHGLTPDQVVAIASNGGGKQALETVQRLLPVLCQAHGLTPAQVVAIASNIGGKQALETVQRLLPVLCQDHGLTPDQVVAIASNGGGKQALETVQRLLPVLCQDHGLTPEQVVAIASNIGGKQALETVQRLLPVLCQAHGLTPDQVVAIASNNGGKQALETVQRLLPVLCQAHGLTPAQVVAIASNGGGKQALETVQRLLPVLCQDHGLTPDQVVAIASHDGGKQALETVQRLLPVLCQDHGLTPEQVVAIASNNGGKQALETVQRLLPVLCQAHGLTPDQVVAIASHDGGKQALETVQRLLPVLCQAHGLTPAQVVAIASNNGGKQALETVQRLLPVLCQDHGLTPEQVVAIASNNGGRPALESIVAQLSRPDPALAALTNDHLVALACLGGRPALDAVKKGLPHAPALIKRTNRRIPERTSHRVAGSSGGSGGSGGSTNLSDIIEKETGKQLVIQESILMLPEEVEEVIGNKPESDILVHTAYDESTDENVMLLTSDAPEYKPWALVIQDSNGENKIKMLSGGSGGSGGSTNLSDIIEKETGKQLVIQESILMLPEEVEEVIGNKPESDILVHTAYDESTDENVMLLTSDAPEYKPWALVIQDSNGENKIKMLSGGSKRTADGSEFEPKKKRKV

SEQ ID NO: 127 - DNA, 4470 bp, Artificial Sequence
  BE4-234-47
atgaagcgcaccgccgacggctctgagttcgagagccccaagaagaagcggaaggtgagctccgagacaggaccagtggcagtggaccctacactgcggagaaggatcgagcctcacgagtttgaggtgttctttgatccaagagagctgaggaaggagacatgcctgctgtacgagatcaagtggggcacatctcacaagatctggcgccactctagcaagaacaccacaaagcacgtggaagtgaatttcatcgagaagtttaccagcgagcggcacttctgccctagcacctcctgttctatcacatggtttctgagctggtccccatgcggcgagtgtagcaaggccatcaccgagttcctgtcccagcacccaaacgtgaccctggtcatctacgtggccaggctgtatcaccacatggaccagcagaacaggcagggcctgcgggatctggtgaattccggcgtgaccatccagatcatgacagcccccgagtacgattactgttggagaaacttcgtgaactacccacctggcaaggaggcacactggcctaggtacccacccctgtggatgaagctgtatgcactggagctgcacgcaggaatcctgggcctgcctccatgcctgaatatcctgcgccggaagcagccccagctgaccttctttacaatcgccctgcagagctgtcactaccagcggctgccacctcacatcctgtgggcaaccggcctgaagtctggaggatcctctggaggaagctccggaagcgagacaccaggcacatctgagagcgccacaccagagtctagcggcggctcctctggaggatcctacacccgggtgggaagcggatccggatctggaagcatcaccaggaccacaaaccctcgcaatgtggtgccaaagatctacatgtccgccggctctatccctctgaccacacacatcacaaacagcatccagccaaccctgtggacaatcggatccatcaatggagtggcaccactggccaagtctatcaagctgggcatccctgtgaccggcagcgcctacacagaccagaccacagccatggtgcggaagaaggtgagcgtgttcatgggcagcggatctggaagcggatctagcatgaccggggtgggaagcggatccggatctggaagcatcaccaggaccacaaaccctcgcaatgtggtgccaaagatctacatgtccgccggctctatccctctgaccacacacatcacaaacagcatccagccaaccctgtggacaatcggatccatcaatggagtggcaccactggccaagtctatcaagctgggcatccctgtgaccggcagcgcctacacagaccagaccacagccatggtgcggaagaaggtgagcgtgttcatgggcagcggatctggaagcggatctagcatgaccgcggtcatggcttcctcccctccaaagaaaaagagaaaggttgcggccgctgactacaaggatgacgacgataaaagttggaaggacgcaagtggttggtctagaatgcatgcggccccgcgacggcgtgctgcgcaaccctccgacgcttcgccggccgcgcaggtggatctacgcacgctcggctacagtcagcagcagcaagagaagatcaaaccgaaggtgcgttcgacagtggcgcagcaccacgaggcactggtgggccatgggtttacacacgcgcacatcgttgcgctcagccaacacccggcagcgttagggaccgtcgctgtcacgtatcagcacataatcacggcgttgccagaggcgacacacgaagacatcgttggcgtcggcaaacagtggtccggcgcacgcgccctggaggccttgctcacggatgcgggggagttgagaggtccgccgttacagttggacacaggccaacttgtgaagattgcaaaacgtggcggcgtgaccgcaatggaggcagtgcatgcatcgcgcaatgcgctcacgggagcacccctcaacctgaccccagaccaggttgtggccatcgccagcaacataggtggcaagcaggccctcgaaaccgtccagagactgttaccggttctctgccaggaccacggcctgaccccggaacaggtggttgcaatcgcgtcacacgatgggggaaagcaggccctagaaaccgttcagcgactcctgcccgtcctgtgccaggcccacggcctgaccccagaccaggttgtggccatcgccagcaacataggtggcaagcaggccctcgaaaccgtccagagactgttaccggttctctgccaggcccacggcctgaccccagcccaagttgtcgcgattgcaagcaacaacggaggcaaacaagccttagaaacagtccagagattgttgccggtgctgtgccaagaccacggcctgaccccagaccaggttgtggccatcgccagcaacataggtggcaagcaggccctcgaaaccgtccagagactgttaccggttctctgccaggaccacggcctgaccccagaacaggttgtggccatcgccagcaacataggtggcaagcaggccctcgaaaccgtccagagactgttaccggttctctgccaggcccacggcctgaccccagaccaagttgtcgcgattgcaagcaacaacggaggcaaacaagccttagaaacagtccagagattgttgcctgtgctgtgccaagcccacggcctgaccccggcccaggtggttgcaatcgcgtcacacgatgggggaaagcaggccctagaaaccgttcagcgactcctgcccgtcctgtgccaggaccacggcctgaccccagaccaagttgtcgcgattgcaagcaacaacggaggcaaacaagccttagaaacagtccagagattgttgccggtgctgtgccaagaccacggcctgaccccagaacaagttgtcgcgattgcaagcaacaacggaggcaaacaagccttagaaacagtccagagattgttgccggtgctgtgccaagcccacggcctgaccccagaccaagttgtcgcgattgcaagcaacaacggaggcaaacaagccttagaaacagtccagagattgttgcctgtgctgtgccaagcccacggcctgaccccggcccaggtggttgcaatcgcgtcacacgatgggggaaagcaggccctagaaaccgttcagcgactcctgcccgtcctgtgccaggaccacggcctgaccccagaccaggttgtggccatcgccagcaacataggtggcaagcaggccctcgaaaccgtccagagactgttaccggttctctgccaggaccacggcctgaccccagaacaggttgtggccatcgccagcaacataggtggcaagcaggccctcgaaaccgtccagagactgttaccggttctctgccaggcccacggcctgaccccagaccaggttgtggccatcgccagcaacataggtggcaagcaggccctcgaaaccgtccagagactgttaccggttctctgccaggcccacggcctgaccccagcccaagttgtcgcgattgcaagcaacaacggaggcaaacaagccttagaaacagtccagagattgttgccggtgctgtgccaagaccacggcctgacccctgagcaggtagtggctattgcatccaacaacgggggcagacccgcactggagtcaatcgtggcccagctttcgaggccggaccccgcgctggccgcactcactaatgatcatcttgtagcgctggcctgcctcggcggacgtcctgccatggatgcagtgaaaaagggattgccgcacgcgccggaattgatcagatcctccggaggatctggaggaagcggaggatccaccaacctgtctgacatcatcgagaaggagacaggcaagcagctggtcatccaggagagcatcctgatgctgcccgaggaggtggaggaagtgatcggcaacaagcctgagtccgatatcctggtgcacaccgcctacgacgagtccacagatgagaatgtgatgctgctgacctctgacgccccagagtataagccctgggccctggtcatccaggatagcaacggcgagaataagatcaagatgctgtccggcggaagcggaggatccggaggctctaccaatctgtccgatattattgaaaaagagacaggcaagcaactggtcatccaggagtctatcctgatgctgccagaagaagtcgaagaagtgatcggaaacaagcccgaaagcgacatcctggtccatactgcctacgacgagagtaccgacgaaaatgtgatgttactgacctccgacgcccctgagtataagccatgggctctggtcatccaggactccaatggagaaaataagatcaagatgttaagcggcggctccaagagaacagccgacggctccgagttcgagcccaagaagaagcggaaagtg

SEQ ID NO: 128 - protein, 1490 aa, Artificial Sequence
  BE4-234-47
MKRTADGSEFESPKKKRKVSSETGPVAVDPTLRRRIEPHEFEVFFDPRELRKETCLLYEIKWGTSHKIWRHSSKNTTKHVEVNFIEKFTSERHFCPSTSCSITWFLSWSPCGECSKAITEFLSQHPNVTLVIYVARLYHHMDQQNRQGLRDLVNSGVTIQIMTAPEYDYCWRNFVNYPPGKEAHWPRYPPLWMKLYALELHAGILGLPPCLNILRRKQPQLTFFTIALQSCHYQRLPPHILWATGLKSGGSSGGSSGSETPGTSESATPESSGGSSGGSYTRVGSGSGSGSITRTTNPRNVVPKIYMSAGSIPLTTHITNSIQPTLWTIGSINGVAPLAKSIKLGIPVTGSAYTDQTTAMVRKKVSVFMGSGSGSGSSMTGVGSGSGSGSITRTTNPRNVVPKIYMSAGSIPLTTHITNSIQPTLWTIGSINGVAPLAKSIKLGIPVTGSAYTDQTTAMVRKKVSVFMGSGSGSGSSMTAVMASSPPKKKRKVAAADYKDDDDKSWKDASGWSRMHAAPRRRAAQPSDASPAAQVDLRTLGYSQQQQEKIKPKVRSTVAQHHEALVGHGFTHAHIVALSQHPAALGTVAVTYQHIITALPEATHEDIVGVGKQWSGARALEALLTDAGELRGPPLQLDTGQLVKIAKRGGVTAMEAVHASRNALTGAPLNLTPDQVVAIASNIGGKQALETVQRLLPVLCQDHGLTPEQVVAIASHDGGKQALETVQRLLPVLCQAHGLTPDQVVAIASNIGGKQALETVQRLLPVLCQAHGLTPAQVVAIASNNGGKQALETVQRLLPVLCQDHGLTPDQVVAIASNIGGKQALETVQRLLPVLCQDHGLTPEQVVAIASNIGGKQALETVQRLLPVLCQAHGLTPDQVVAIASNNGGKQALETVQRLLPVLCQAHGLTPAQVVAIASHDGGKQALETVQRLLPVLCQDHGLTPDQVVAIASNNGGKQALETVQRLLPVLCQDHGLTPEQVVAIASNNGGKQALETVQRLLPVLCQAHGLTPDQVVAIASNNGGKQALETVQRLLPVLCQAHGLTPAQVVAIASHDGGKQALETVQRLLPVLCQDHGLTPDQVVAIASNIGGKQALETVQRLLPVLCQDHGLTPEQVVAIASNIGGKQALETVQRLLPVLCQAHGLTPDQVVAIASNIGGKQALETVQRLLPVLCQAHGLTPAQVVAIASNNGGKQALETVQRLLPVLCQDHGLTPEQVVAIASNNGGRPALESIVAQLSRPDPALAALTNDHLVALACLGGRPAMDAVKKGLPHAPELIRSSGGSGGSGGSTNLSDIIEKETGKQLVIQESILMLPEEVEEVIGNKPESDILVHTAYDESTDENVMLLTSDAPEYKPWALVIQDSNGENKIKMLSGGSGGSGGSTNLSDIIEKETGKQLVIQESILMLPEEVEEVIGNKPESDILVHTAYDESTDENVMLLTSDAPEYKPWALVIQDSNGENKIKMLSGGSKRTADGSEFEPKKKRKV

SEQ ID NO: 129 - DNA, 4470 bp, Artificial Sequence
  BE4-234-47-NC
atgaagcgcaccgccgacggctctgagttcgagagccccaagaagaagcggaaggtgagctccgagacaggaccagtggcagtggaccctacactgcggagaaggatcgagcctcacgagtttgaggtgttctttgatccaagagagctgaggaaggagacatgcctgctgtacgagatcaagtggggcacatctcacaagatctggcgccactctagcaagaacaccacaaagcacgtggaagtgaatttcatcgagaagtttaccagcgagcggcacttctgccctagcacctcctgttctatcacatggtttctgagctggtccccatgcggcgagtgtagcaaggccatcaccgagttcctgtcccagcacccaaacgtgaccctggtcatctacgtggccaggctgtatcaccacatggaccagcagaacaggcagggcctgcgggatctggtgaattccggcgtgaccatccagatcatgacagcccccgagtacgattactgttggagaaacttcgtgaactacccacctggcaaggaggcacactggcctaggtacccacccctgtggatgaagctgtatgcactggagctgcacgcaggaatcctgggcctgcctccatgcctgaatatcctgcgccggaagcagccccagctgaccttctttacaatcgccctgcagagctgtcactaccagcggctgccacctcacatcctgtgggcaaccggcctgaagtctggaggatcctctggaggaagctccggaagcgagacaccaggcacatctgagagcgccacaccagagtctagcggcggctcctctggaggatcctacacccgggtgggaagcggatccggatctggaagcatcaccaggaccacaaaccctcgcaatgtggtgccaaagatctacatgtccgccggctctatccctctgaccacacacatcacaaacagcatccagccaaccctgtggacaatcggatccatcaatggagtggcaccactggccaagtctatcaagctgggcatccctgtgaccggcagcgcctacacagaccagaccacagccatggtgcggaagaaggtgagcgtgttcatgggcagcggatctggaagcggatctagcatgaccggggtgggaagcggatccggatctggaagcatcaccaggaccacaaaccctcgcaatgtggtgccaaagatctacatgtccgccggctctatccctctgaccacacacatcacaaacagcatccagccaaccctgtggacaatcggatccatcaatggagtggcaccactggccaagtctatcaagctgggcatccctgtgaccggcagcgcctacacagaccagaccacagccatggtgcggaagaaggtgagcgtgttcatgggcagcggatctggaagcggatctagcatgaccgcggtcatggcttcctcccctccaaagaaaaagagaaaggttgcggccgctgactacaaggatgacgacgataaaagttggaaggacgcaagtggttggtctagaatgcatgcggccccgcgacggcgtgctgcgcaaccctccgacgcttcgccggccgcgcaggtggatctacgcacgctcggctacagtcagcagcagcaagagaagatcaaaccgaaggtgcgttcgacagtggcgcagcaccacgaggcactggtgggccatgggtttacacacgcgcacatcgttgcgctcagccaacacccggcagcgttagggaccgtcgctgtcacgtatcagcacataatcacggcgttgccagaggcgacacacgaagacatcgttggcgtcggcaaacagtggtccggcgcacgcgccctggaggccttgctcacggatgcgggggagttgagaggtccgccgttacagttggacacaggccaacttgtgaagattgcaaaacgtggcggcgtgaccgcaatggaggcagtgcatgcatcgcgcaatgcgctcacgggagcacccctcaacctgacccccgaccaggttgtcgctattgctagtaacggcggaggcaaacaggcgctggaaacagttcagcgcctcttgccggtcttgtgtcaggaccacggcctgaccccagaacaagttgtcgcgattgcaagcaacaacggaggcaaacaagccttagaaacagtccagagattgttgccggtgctgtgccaagcccacggcctgaccccggaccaggtggttgcaatcgcgtcacacgatgggggaaagcaggccctagaaaccgttcagcgactcctgcccgtcctgtgccaggcccacggcctgaccccagcccaagttgtcgcgattgcaagcaacaacggaggcaaacaagccttagaaacagtccagagattgttgccggtgctgtgccaagaccacggcctgaccccggaccaggtggttgcaatcgcgtcacacgatgggggaaagcaggccctagaaaccgttcagcgactcctgcccgtcctgtgccaggaccacggcctgaccccagaacaagttgtcgcgattgcaagcaacaacggaggcaaacaagccttagaaacagtccagagattgttgccggtgctgtgccaagcccacggcctgacccccgaccaggttgtcgctattgctagtaacggcggaggcaaacaggcgctggaaacagttcagcgcctcttgccggtcttgtgtcaggcccacggcctgaccccagcccaggttgtggccatcgccagcaacataggtggcaagcaggccctcgaaaccgtccagagactgttaccggttctctgccaggaccacggcctgacccccgaccaggttgtcgctattgctagtaacggcggaggcaaacaggcgctggaaacagttcagcgcctcttgccggtcttgtgtcaggaccacggcctgaccccagaacaggttgtggccatcgccagcaacataggtggcaagcaggccctcgaaaccgtccagagactgttaccggttctctgccaggcccacggcctgaccccagaccaagttgtcgcgattgcaagcaacaacggaggcaaacaagccttagaaacagtccagagattgttgcctgtgctgtgccaagcccacggcctgacccccgcccaggttgtcgctattgctagtaacggcggaggcaaacaggcgctggaaacagttcagcgcctcttgccggtcttgtgtcaggaccacggcctgaccccggaccaggtggttgcaatcgcgtcacacgatgggggaaagcaggccctagaaaccgttcagcgactcctgcccgtcctgtgccaggaccacggcctgaccccagaacaagttgtcgcgattgcaagcaacaacggaggcaaacaagccttagaaacagtccagagattgttgccggtgctgtgccaagcccacggcctgaccccggaccaggtggttgcaatcgcgtcacacgatgggggaaagcaggccctagaaaccgttcagcgactcctgcccgtcctgtgccaggcccacggcctgaccccagcccaagttgtcgcgattgcaagcaacaacggaggcaaacaagccttagaaacagtccagagattgttgccggtgctgtgccaagaccacggcctgacccctgagcaggtagtggctattgcatccaacaacgggggcagacccgcactggagtcaatcgtggcccagctttcgaggccggaccccgcgctggccgcactcactaatgatcatcttgtagcgctggcctgcctcggcggacgtcctgccatggatgcagtgaaaaagggattgccgcacgcgccggaattgatcagatcctccggaggatctggaggaagcggaggatccaccaacctgtctgacatcatcgagaaggagacaggcaagcagctggtcatccaggagagcatcctgatgctgcccgaggaggtggaggaagtgatcggcaacaagcctgagtccgatatcctggtgcacaccgcctacgacgagtccacagatgagaatgtgatgctgctgacctctgacgccccagagtataagccctgggccctggtcatccaggatagcaacggcgagaataagatcaagatgctgtccggcggaagcggaggatccggaggctctaccaatctgtccgatattattgaaaaagagacaggcaagcaactggtcatccaggagtctatcctgatgctgccagaagaagtcgaagaagtgatcggaaacaagcccgaaagcgacatcctggtccatactgcctacgacgagagtaccgacgaaaatgtgatgttactgacctccgacgcccctgagtataagccatgggctctggtcatccaggactccaatggagaaaataagatcaagatgttaagcggcggctccaagagaacagccgacggctccgagttcgagcccaagaagaagcggaaagtg

SEQ ID NO: 130 - protein, 1490 aa, Artificial Sequence
  BE4-234-47-NC
MKRTADGSEFESPKKKRKVSSETGPVAVDPTLRRRIEPHEFEVFFDPRELRKETCLLYEIKWGTSHKIWRHSSKNTTKHVEVNFIEKFTSERHFCPSTSCSITWFLSWSPCGECSKAITEFLSQHPNVTLVIYVARLYHHMDQQNRQGLRDLVNSGVTIQIMTAPEYDYCWRNFVNYPPGKEAHWPRYPPLWMKLYALELHAGILGLPPCLNILRRKQPQLTFFTIALQSCHYQRLPPHILWATGLKSGGSSGGSSGSETPGTSESATPESSGGSSGGSYTRVGSGSGSGSITRTTNPRNVVPKIYMSAGSIPLTTHITNSIQPTLWTIGSINGVAPLAKSIKLGIPVTGSAYTDQTTAMVRKKVSVFMGSGSGSGSSMTGVGSGSGSGSITRTTNPRNVVPKIYMSAGSIPLTTHITNSIQPTLWTIGSINGVAPLAKSIKLGIPVTGSAYTDQTTAMVRKKVSVFMGSGSGSGSSMTAVMASSPPKKKRKVAAADYKDDDDKSWKDASGWSRMHAAPRRRAAQPSDASPAAQVDLRTLGYSQQQQEKIKPKVRSTVAQHHEALVGHGFTHAHIVALSQHPAALGTVAVTYQHIITALPEATHEDIVGVGKQWSGARALEALLTDAGELRGPPLQLDTGQLVKIAKRGGVTAMEAVHASRNALTGAPLNLTPDQVVAIASNGGGKQALETVQRLLPVLCQDHGLTPEQVVAIASNNGGKQALETVQRLLPVLCQAHGLTPDQVVAIASHDGGKQALETVQRLLPVLCQAHGLTPAQVVAIASNNGGKQALETVQRLLPVLCQDHGLTPDQVVAIASHDGGKQALETVQRLLPVLCQDHGLTPEQVVAIASNNGGKQALETVQRLLPVLCQAHGLTPDQVVAIASNGGGKQALETVQRLLPVLCQAHGLTPAQVVAIASNIGGKQALETVQRLLPVLCQDHGLTPDQVVAIASNGGGKQALETVQRLLPVLCQDHGLTPEQVVAIASNIGGKQALETVQRLLPVLCQAHGLTPDQVVAIASNNGGKQALETVQRLLPVLCQAHGLTPAQVVAIASNGGGKQALETVQRLLPVLCQDHGLTPDQVVAIASHDGGKQALETVQRLLPVLCQDHGLTPEQVVAIASNNGGKQALETVQRLLPVLCQAHGLTPDQVVAIASHDGGKQALETVQRLLPVLCQAHGLTPAQVVAIASNNGGKQALETVQRLLPVLCQDHGLTPEQVVAIASNNGGRPALESIVAQLSRPDPALAALTNDHLVALACLGGRPAMDAVKKGLPHAPELIRSSGGSGGSGGSTNLSDIIEKETGKQLVIQESILMLPEEVEEVIGNKPESDILVHTAYDESTDENVMLLTSDAPEYKPWALVIQDSNGENKIKMLSGGSGGSGGSTNLSDIIEKETGKQLVIQESILMLPEEVEEVIGNKPESDILVHTAYDESTDENVMLLTSDAPEYKPWALVIQDSNGENKIKMLSGGSKRTADGSEFEPKKKRKV

SEQ ID NO: 131 - DNA, 3678 bp, Artificial Sequence
  ABE8e-32-47
atgaagcgcaccgccgacggctctgagttcgagagccccaagaagaagcggaaggtgtctgaggtggagttttcccacgagtattggatgagacatgcactgaccctggcaaagagggcacgcgatgagagggaagtccctgtcggcgccgtgctggtgctgaacaacagagtgatcggcgagggatggaacagggcaatcggcctgcacgaccctacagcccatgccgaaattatggccctgaggcagggaggcctggtcatgcagaactaccgcctgattgacgccaccctgtacgtgacattcgagccttgcgtgatgtgcgccggcgcaatgatccacagcaggatcggaagggtggtgtttggctggcgcaactcaaaaagaggagcagcaggctccctgatgaacgtgctgaactacccaggcatgaatcaccgggtcgaaattaccgagggaatcctggcagatgaatgtgccgccctgctgtgcgatttctatcggatgcccagacaggtgttcaatgctcagaagaaggcccagagctccatcaactctggaggatcctctggaggaagctccggaagcgagacaccaggcacatctgagagcgccacaccagagtctagcggcggctcctctggaggatccatggcttcctcccctccaaagaaaaagagaaaggttgcggccgctgactacaaggatgacgacgataaaagttggaaggacgcaagtggttggtctagaatgcatgcggccccgcgacggcgtgctgcgcaaccctccgacgcttcgccggccgcgcaggtggatctacgcacgctcggctacagtcagcagcagcaagagaagatcaaaccgaaggtgcgttcgacagtggcgcagcaccacgaggcactggtgggccatgggtttacacacgcgcacatcgttgcgctcagccaacacccggcagcgttagggaccgtcgctgtcacgtatcagcacataatcacggcgttgccagaggcgacacacgaagacatcgttggcgtcggcaaacagtggtccggcgcacgcgccctggaggccttgctcacggatgcgggggagttgagaggtccgccgttacagttggacacaggccaacttgtgaagattgcaaaacgtggcggcgtgaccgcaatggaggcagtgcatgcatcgcgcaatgcgctcacgggagcacccctcaacctgaccccagaccaggttgtggccatcgccagcaacataggtggcaagcaggccctcgaaaccgtccagagactgttaccggttctctgccaggaccacggcctgaccccggaacaggtggttgcaatcgcgtcacacgatgggggaaagcaggccctagaaaccgttcagcgactcctgcccgtcctgtgccaggcccacggcctgaccccagaccaggttgtggccatcgccagcaacataggtggcaagcaggccctcgaaaccgtccagagactgttaccggttctctgccaggcccacggcctgaccccagcccaagttgtcgcgattgcaagcaacaacggaggcaaacaagccttagaaacagtccagagattgttgccggtgctgtgccaagaccacggcctgaccccagaccaggttgtggccatcgccagcaacataggtggcaagcaggccctcgaaaccgtccagagactgttaccggttctctgccaggaccacggcctgaccccagaacaggttgtggccatcgccagcaacataggtggcaagcaggccctcgaaaccgtccagagactgttaccggttctctgccaggcccacggcctgaccccagaccaagttgtcgcgattgcaagcaacaacggaggcaaacaagccttagaaacagtccagagattgttgcctgtgctgtgccaagcccacggcctgaccccggcccaggtggttgcaatcgcgtcacacgatgggggaaagcaggccctagaaaccgttcagcgactcctgcccgtcctgtgccaggaccacggcctgaccccagaccaagttgtcgcgattgcaagcaacaacggaggcaaacaagccttagaaacagtccagagattgttgccggtgctgtgccaagaccacggcctgaccccagaacaagttgtcgcgattgcaagcaacaacggaggcaaacaagccttagaaacagtccagagattgttgccggtgctgtgccaagcccacggcctgaccccagaccaagttgtcgcgattgcaagcaacaacggaggcaaacaagccttagaaacagtccagagattgttgcctgtgctgtgccaagcccacggcctgaccccggcccaggtggttgcaatcgcgtcacacgatgggggaaagcaggccctagaaaccgttcagcgactcctgcccgtcctgtgccaggaccacggcctgaccccagaccaggttgtggccatcgccagcaacataggtggcaagcaggccctcgaaaccgtccagagactgttaccggttctctgccaggaccacggcctgaccccagaacaggttgtggccatcgccagcaacataggtggcaagcaggccctcgaaaccgtccagagactgttaccggttctctgccaggcccacggcctgaccccagaccaggttgtggccatcgccagcaacataggtggcaagcaggccctcgaaaccgtccagagactgttaccggttctctgccaggcccacggcctgaccccagcccaagttgtcgcgattgcaagcaacaacggaggcaaacaagccttagaaacagtccagagattgttgccggtgctgtgccaagaccacggcctgacccctgagcaggtagtggctattgcatccaacaacgggggcagacccgcactggagtcaatcgtggcccagctttcgaggccggaccccgcgctggccgcactcactaatgatcatcttgtagcgctggcctgcctcggcggacgtcctgccatggatgcagtgaaaaagggattgccgcacgcgccggaattgatcagatcctccggaggatctggaggaagcggaggatccaccaacctgtctgacatcatcgagaaggagacaggcaagcagctggtcatccaggagagcatcctgatgctgcccgaggaggtggaggaagtgatcggcaacaagcctgagtccgatatcctggtgcacaccgcctacgacgagtccacagatgagaatgtgatgctgctgacctctgacgccccagagtataagccctgggccctggtcatccaggatagcaacggcgagaataagatcaagatgctgtccggcggaagcggaggatccggaggctctaccaatctgtccgatattattgaaaaagagacaggcaagcaactggtcatccaggagtctatcctgatgctgccagaagaagtcgaagaagtgatcggaaacaagcccgaaagcgacatcctggtccatactgcctacgacgagagtaccgacgaaaatgtgatgttactgacctccgacgcccctgagtataagccatgggctctggtcatccaggactccaatggagaaaataagatcaagatgttaagcggcggctccaagagaacagccgacggctccgagttcgagcccaagaagaagcggaaagtg

SEQ ID NO: 132 - protein, 1226 aa, Artificial Sequence
  ABE8e-32-47
MKRTADGSEFESPKKKRKVSEVEFSHEYWMRHALTLAKRARDEREVPVGAVLVLNNRVIGEGWNRAIGLHDPTAHAEIMALRQGGLVMQNYRLIDATLYVTFEPCVMCAGAMIHSRIGRVVFGWRNSKRGAAGSLMNVLNYPGMNHRVEITEGILADECAALLCDFYRMPRQVFNAQKKAQSSINSGGSSGGSSGSETPGTSESATPESSGGSSGGSMASSPPKKKRKVAAADYKDDDDKSWKDASGWSRMHAAPRRRAAQPSDASPAAQVDLRTLGYSQQQQEKIKPKVRSTVAQHHEALVGHGFTHAHIVALSQHPAALGTVAVTYQHIITALPEATHEDIVGVGKQWSGARALEALLTDAGELRGPPLQLDTGQLVKIAKRGGVTAMEAVHASRNALTGAPLNLTPDQVVAIASNIGGKQALETVQRLLPVLCQDHGLTPEQVVAIASHDGGKQALETVQRLLPVLCQAHGLTPDQVVAIASNIGGKQALETVQRLLPVLCQAHGLTPAQVVAIASNNGGKQALETVQRLLPVLCQDHGLTPDQVVAIASNIGGKQALETVQRLLPVLCQDHGLTPEQVVAIASNIGGKQALETVQRLLPVLCQAHGLTPDQVVAIASNNGGKQALETVQRLLPVLCQAHGLTPAQVVAIASHDGGKQALETVQRLLPVLCQDHGLTPDQVVAIASNNGGKQALETVQRLLPVLCQDHGLTPEQVVAIASNNGGKQALETVQRLLPVLCQAHGLTPDQVVAIASNNGGKQALETVQRLLPVLCQAHGLTPAQVVAIASHDGGKQALETVQRLLPVLCQDHGLTPDQVVAIASNIGGKQALETVQRLLPVLCQDHGLTPEQVVAIASNIGGKQALETVQRLLPVLCQAHGLTPDQVVAIASNIGGKQALETVQRLLPVLCQAHGLTPAQVVAIASNNGGKQALETVQRLLPVLCQDHGLTPEQVVAIASNNGGRPALESIVAQLSRPDPALAALTNDHLVALACLGGRPAMDAVKKGLPHAPELIRSSGGSGGSGGSTNLSDIIEKETGKQLVIQESILMLPEEVEEVIGNKPESDILVHTAYDESTDENVMLLTSDAPEYKPWALVIQDSNGENKIKMLSGGSGGSGGSTNLSDIIEKETGKQLVIQESILMLPEEVEEVIGNKPESDILVHTAYDESTDENVMLLTSDAPEYKPWALVIQDSNGENKIKMLSGGSKRTADGSEFEPKKKRKV

SEQ ID NO: 133 - DNA, 3678 bp, Artificial Sequence
  ABE8e-32-47-NC
atgaagcgcaccgccgacggctctgagttcgagagccccaagaagaagcggaaggtgtctgaggtggagttttcccacgagtattggatgagacatgcactgaccctggcaaagagggcacgcgatgagagggaagtccctgtcggcgccgtgctggtgctgaacaacagagtgatcggcgagggatggaacagggcaatcggcctgcacgaccctacagcccatgccgaaattatggccctgaggcagggaggcctggtcatgcagaactaccgcctgattgacgccaccctgtacgtgacattcgagccttgcgtgatgtgcgccggcgcaatgatccacagcaggatcggaagggtggtgtttggctggcgcaactcaaaaagaggagcagcaggctccctgatgaacgtgctgaactacccaggcatgaatcaccgggtcgaaattaccgagggaatcctggcagatgaatgtgccgccctgctgtgcgatttctatcggatgcccagacaggtgttcaatgctcagaagaaggcccagagctccatcaactctggaggatcctctggaggaagctccggaagcgagacaccaggcacatctgagagcgccacaccagagtctagcggcggctcctctggaggatccatggcttcctcccctccaaagaaaaagagaaaggttgcggccgctgactacaaggatgacgacgataaaagttggaaggacgcaagtggttggtctagaatgcatgcggccccgcgacggcgtgctgcgcaaccctccgacgcttcgccggccgcgcaggtggatctacgcacgctcggctacagtcagcagcagcaagagaagatcaaaccgaaggtgcgttcgacagtggcgcagcaccacgaggcactggtgggccatgggtttacacacgcgcacatcgttgcgctcagccaacacccggcagcgttagggaccgtcgctgtcacgtatcagcacataatcacggcgttgccagaggcgacacacgaagacatcgttggcgtcggcaaacagtggtccggcgcacgcgccctggaggccttgctcacggatgcgggggagttgagaggtccgccgttacagttggacacaggccaacttgtgaagattgcaaaacgtggcggcgtgaccgcaatggaggcagtgcatgcatcgcgcaatgcgctcacgggagcacccctcaacctgacccccgaccaggttgtcgctattgctagtaacggcggaggcaaacaggcgctggaaacagttcagcgcctcttgccggtcttgtgtcaggaccacggcctgaccccagaacaagttgtcgcgattgcaagcaacaacggaggcaaacaagccttagaaacagtccagagattgttgccggtgctgtgccaagcccacggcctgaccccggaccaggtggttgcaatcgcgtcacacgatgggggaaagcaggccctagaaaccgttcagcgactcctgcccgtcctgtgccaggcccacggcctgaccccagcccaagttgtcgcgattgcaagcaacaacggaggcaaacaagccttagaaacagtccagagattgttgccggtgctgtgccaagaccacggcctgaccccggaccaggtggttgcaatcgcgtcacacgatgggggaaagcaggccctagaaaccgttcagcgactcctgcccgtcctgtgccaggaccacggcctgaccccagaacaagttgtcgcgattgcaagcaacaacggaggcaaacaagccttagaaacagtccagagattgttgccggtgctgtgccaagcccacggcctgacccccgaccaggttgtcgctattgctagtaacggcggaggcaaacaggcgctggaaacagttcagcgcctcttgccggtcttgtgtcaggcccacggcctgaccccagcccaggttgtggccatcgccagcaacataggtggcaagcaggccctcgaaaccgtccagagactgttaccggttctctgccaggaccacggcctgacccccgaccaggttgtcgctattgctagtaacggcggaggcaaacaggcgctggaaacagttcagcgcctcttgccggtcttgtgtcaggaccacggcctgaccccagaacaggttgtggccatcgccagcaacataggtggcaagcaggccctcgaaaccgtccagagactgttaccggttctctgccaggcccacggcctgaccccagaccaagttgtcgcgattgcaagcaacaacggaggcaaacaagccttagaaacagtccagagattgttgcctgtgctgtgccaagcccacggcctgacccccgcccaggttgtcgctattgctagtaacggcggaggcaaacaggcgctggaaacagttcagcgcctcttgccggtcttgtgtcaggaccacggcctgaccccggaccaggtggttgcaatcgcgtcacacgatgggggaaagcaggccctagaaaccgttcagcgactcctgcccgtcctgtgccaggaccacggcctgaccccagaacaagttgtcgcgattgcaagcaacaacggaggcaaacaagccttagaaacagtccagagattgttgccggtgctgtgccaagcccacggcctgaccccggaccaggtggttgcaatcgcgtcacacgatgggggaaagcaggccctagaaaccgttcagcgactcctgcccgtcctgtgccaggcccacggcctgaccccagcccaagttgtcgcgattgcaagcaacaacggaggcaaacaagccttagaaacagtccagagattgttgccggtgctgtgccaagaccacggcctgacccctgagcaggtagtggctattgcatccaacaacgggggcagacccgcactggagtcaatcgtggcccagctttcgaggccggaccccgcgctggccgcactcactaatgatcatcttgtagcgctggcctgcctcggcggacgtcctgccatggatgcagtgaaaaagggattgccgcacgcgccggaattgatcagatcctccggaggatctggaggaagcggaggatccaccaacctgtctgacatcatcgagaaggagacaggcaagcagctggtcatccaggagagcatcctgatgctgcccgaggaggtggaggaagtgatcggcaacaagcctgagtccgatatcctggtgcacaccgcctacgacgagtccacagatgagaatgtgatgctgctgacctctgacgccccagagtataagccctgggccctggtcatccaggatagcaacggcgagaataagatcaagatgctgtccggcggaagcggaggatccggaggctctaccaatctgtccgatattattgaaaaagagacaggcaagcaactggtcatccaggagtctatcctgatgctgccagaagaagtcgaagaagtgatcggaaacaagcccgaaagcgacatcctggtccatactgcctacgacgagagtaccgacgaaaatgtgatgttactgacctccgacgcccctgagtataagccatgggctctggtcatccaggactccaatggagaaaataagatcaagatgttaagcggcggctccaagagaacagccgacggctccgagttcgagcccaagaagaagcggaaagtg

SEQ ID NO: 134 - protein, 1226 aa, Artificial Sequence
  ABE8e-32-47-NC
MKRTADGSEFESPKKKRKVSEVEFSHEYWMRHALTLAKRARDEREVPVGAVLVLNNRVIGEGWNRAIGLHDPTAHAEIMALRQGGLVMQNYRLIDATLYVTFEPCVMCAGAMIHSRIGRVVFGWRNSKRGAAGSLMNVLNYPGMNHRVEITEGILADECAALLCDFYRMPRQVFNAQKKAQSSINSGGSSGGSSGSETPGTSESATPESSGGSSGGSMASSPPKKKRKVAAADYKDDDDKSWKDASGWSRMHAAPRRRAAQPSDASPAAQVDLRTLGYSQQQQEKIKPKVRSTVAQHHEALVGHGFTHAHIVALSQHPAALGTVAVTYQHIITALPEATHEDIVGVGKQWSGARALEALLTDAGELRGPPLQLDTGQLVKIAKRGGVTAMEAVHASRNALTGAPLNLTPDQVVAIASNGGGKQALETVQRLLPVLCQDHGLTPEQVVAIASNNGGKQALETVQRLLPVLCQAHGLTPDQVVAIASHDGGKQALETVQRLLPVLCQAHGLTPAQVVAIASNNGGKQALETVQRLLPVLCQDHGLTPDQVVAIASHDGGKQALETVQRLLPVLCQDHGLTPEQVVAIASNNGGKQALETVQRLLPVLCQAHGLTPDQVVAIASNGGGKQALETVQRLLPVLCQAHGLTPAQVVAIASNIGGKQALETVQRLLPVLCQDHGLTPDQVVAIASNGGGKQALETVQRLLPVLCQDHGLTPEQVVAIASNIGGKQALETVQRLLPVLCQAHGLTPDQVVAIASNNGGKQALETVQRLLPVLCQAHGLTPAQVVAIASNGGGKQALETVQRLLPVLCQDHGLTPDQVVAIASHDGGKQALETVQRLLPVLCQDHGLTPEQVVAIASNNGGKQALETVQRLLPVLCQAHGLTPDQVVAIASHDGGKQALETVQRLLPVLCQAHGLTPAQVVAIASNNGGKQALETVQRLLPVLCQDHGLTPEQVVAIASNNGGRPALESIVAQLSRPDPALAALTNDHLVALACLGGRPAMDAVKKGLPHAPELIRSSGGSGGSGGSTNLSDIIEKETGKQLVIQESILMLPEEVEEVIGNKPESDILVHTAYDESTDENVMLLTSDAPEYKPWALVIQDSNGENKIKMLSGGSGGSGGSTNLSDIIEKETGKQLVIQESILMLPEEVEEVIGNKPESDILVHTAYDESTDENVMLLTSDAPEYKPWALVIQDSNGENKIKMLSGGSKRTADGSEFEPKKKRKV

SEQ ID NO: 135 - DNA, 3987 bp, Artificial Sequence
  ABE8e-135-47
atgaagcgcaccgccgacggctctgagttcgagagccccaagaagaagcggaaggtgtctgaggtggagttttcccacgagtattggatgagacatgcactgaccctggcaaagagggcacgcgatgagagggaagtccctgtcggcgccgtgctggtgctgaacaacagagtgatcggcgagggatggaacagggcaatcggcctgcacgaccctacagcccatgccgaaattatggccctgaggcagggaggcctggtcatgcagaactaccgcctgattgacgccaccctgtacgtgacattcgagccttgcgtgatgtgcgccggcgcaatgatccacagcaggatcggaagggtggtgtttggctggcgcaactcaaaaagaggagcagcaggctccctgatgaacgtgctgaactacccaggcatgaatcaccgggtcgaaattaccgagggaatcctggcagatgaatgtgccgccctgctgtgcgatttctatcggatgcccagacaggtgttcaatgctcagaagaaggcccagagctccatcaactctggaggatcctctggaggaagctccggaagcgagacaccaggcacatctgagagcgccacaccagagtctagcggcggctcctctggaggatcctacacccgggtgggaagcggatccggatctggaagcatcaccaggaccacaaaccctcgcaatgtggtgccaaagatctacatgtccgccggctctatccctctgaccacacacatcacaaacagcatccagccaaccctgtggacaatcggatccatcaatggagtggcaccactggccaagtctatcaagctgggcatccctgtgaccggcagcgcctacacagaccagaccacagccatggtgcggaagaaggtgagcgtgttcatgggcagcggatctggaagcggatctagcatgaccgcggtcatggcttcctcccctccaaagaaaaagagaaaggttgcggccgctgactacaaggatgacgacgataaaagttggaaggacgcaagtggttggtctagaatgcatgcggccccgcgacggcgtgctgcgcaaccctccgacgcttcgccggccgcgcaggtggatctacgcacgctcggctacagtcagcagcagcaagagaagatcaaaccgaaggtgcgttcgacagtggcgcagcaccacgaggcactggtgggccatgggtttacacacgcgcacatcgttgcgctcagccaacacccggcagcgttagggaccgtcgctgtcacgtatcagcacataatcacggcgttgccagaggcgacacacgaagacatcgttggcgtcggcaaacagtggtccggcgcacgcgccctggaggccttgctcacggatgcgggggagttgagaggtccgccgttacagttggacacaggccaacttgtgaagattgcaaaacgtggcggcgtgaccgcaatggaggcagtgcatgcatcgcgcaatgcgctcacgggagcacccctcaacctgaccccagaccaggttgtggccatcgccagcaacataggtggcaagcaggccctcgaaaccgtccagagactgttaccggttctctgccaggaccacggcctgaccccggaacaggtggttgcaatcgcgtcacacgatgggggaaagcaggccctagaaaccgttcagcgactcctgcccgtcctgtgccaggcccacggcctgaccccagaccaggttgtggccatcgccagcaacataggtggcaagcaggccctcgaaaccgtccagagactgttaccggttctctgccaggcccacggcctgaccccagcccaagttgtcgcgattgcaagcaacaacggaggcaaacaagccttagaaacagtccagagattgttgccggtgctgtgccaagaccacggcctgaccccagaccaggttgtggccatcgccagcaacataggtggcaagcaggccctcgaaaccgtccagagactgttaccggttctctgccaggaccacggcctgaccccagaacaggttgtggccatcgccagcaacataggtggcaagcaggccctcgaaaccgtccagagactgttaccggttctctgccaggcccacggcctgaccccagaccaagttgtcgcgattgcaagcaacaacggaggcaaacaagccttagaaacagtccagagattgttgcctgtgctgtgccaagcccacggcctgaccccggcccaggtggttgcaatcgcgtcacacgatgggggaaagcaggccctagaaaccgttcagcgactcctgcccgtcctgtgccaggaccacggcctgaccccagaccaagttgtcgcgattgcaagcaacaacggaggcaaacaagccttagaaacagtccagagattgttgccggtgctgtgccaagaccacggcctgaccccagaacaagttgtcgcgattgcaagcaacaacggaggcaaacaagccttagaaacagtccagagattgttgccggtgctgtgccaagcccacggcctgaccccagaccaagttgtcgcgattgcaagcaacaacggaggcaaacaagccttagaaacagtccagagattgttgcctgtgctgtgccaagcccacggcctgaccccggcccaggtggttgcaatcgcgtcacacgatgggggaaagcaggccctagaaaccgttcagcgactcctgcccgtcctgtgccaggaccacggcctgaccccagaccaggttgtggccatcgccagcaacataggtggcaagcaggccctcgaaaccgtccagagactgttaccggttctctgccaggaccacggcctgaccccagaacaggttgtggccatcgccagcaacataggtggcaagcaggccctcgaaaccgtccagagactgttaccggttctctgccaggcccacggcctgaccccagaccaggttgtggccatcgccagcaacataggtggcaagcaggccctcgaaaccgtccagagactgttaccggttctctgccaggcccacggcctgaccccagcccaagttgtcgcgattgcaagcaacaacggaggcaaacaagccttagaaacagtccagagattgttgccggtgctgtgccaagaccacggcctgacccctgagcaggtagtggctattgcatccaacaacgggggcagacccgcactggagtcaatcgtggcccagctttcgaggccggaccccgcgctggccgcactcactaatgatcatcttgtagcgctggcctgcctcggcggacgtcctgccatggatgcagtgaaaaagggattgccgcacgcgccggaattgatcagatcctccggaggatctggaggaagcggaggatccaccaacctgtctgacatcatcgagaaggagacaggcaagcagctggtcatccaggagagcatcctgatgctgcccgaggaggtggaggaagtgatcggcaacaagcctgagtccgatatcctggtgcacaccgcctacgacgagtccacagatgagaatgtgatgctgctgacctctgacgccccagagtataagccctgggccctggtcatccaggatagcaacggcgagaataagatcaagatgctgtccggcggaagcggaggatccggaggctctaccaatctgtccgatattattgaaaaagagacaggcaagcaactggtcatccaggagtctatcctgatgctgccagaagaagtcgaagaagtgatcggaaacaagcccgaaagcgacatcctggtccatactgcctacgacgagagtaccgacgaaaatgtgatgttactgacctccgacgcccctgagtataagccatgggctctggtcatccaggactccaatggagaaaataagatcaagatgttaagcggcggctccaagagaacagccgacggctccgagttcgagcccaagaagaagcggaaagtg

SEQ ID NO: 136 - protein, 1329 aa, Artificial Sequence
  ABE8e-135-47
MKRTADGSEFESPKKKRKVSEVEFSHEYWMRHALTLAKRARDEREVPVGAVLVLNNRVIGEGWNRAIGLHDPTAHAEIMALRQGGLVMQNYRLIDATLYVTFEPCVMCAGAMIHSRIGRVVFGWRNSKRGAAGSLMNVLNYPGMNHRVEITEGILADECAALLCDFYRMPRQVFNAQKKAQSSINSGGSSGGSSGSETPGTSESATPESSGGSSGGSYTRVGSGSGSGSITRTTNPRNVVPKIYMSAGSIPLTTHITNSIQPTLWTIGSINGVAPLAKSIKLGIPVTGSAYTDQTTAMVRKKVSVFMGSGSGSGSSMTAVMASSPPKKKRKVAAADYKDDDDKSWKDASGWSRMHAAPRRRAAQPSDASPAAQVDLRTLGYSQQQQEKIKPKVRSTVAQHHEALVGHGFTHAHIVALSQHPAALGTVAVTYQHIITALPEATHEDIVGVGKQWSGARALEALLTDAGELRGPPLQLDTGQLVKIAKRGGVTAMEAVHASRNALTGAPLNLTPDQVVAIASNIGGKQALETVQRLLPVLCQDHGLTPEQVVAIASHDGGKQALETVQRLLPVLCQAHGLTPDQVVAIASNIGGKQALETVQRLLPVLCQAHGLTPAQVVAIASNNGGKQALETVQRLLPVLCQDHGLTPDQVVAIASNIGGKQALETVQRLLPVLCQDHGLTPEQVVAIASNIGGKQALETVQRLLPVLCQAHGLTPDQVVAIASNNGGKQALETVQRLLPVLCQAHGLTPAQVVAIASHDGGKQALETVQRLLPVLCQDHGLTPDQVVAIASNNGGKQALETVQRLLPVLCQDHGLTPEQVVAIASNNGGKQALETVQRLLPVLCQAHGLTPDQVVAIASNNGGKQALETVQRLLPVLCQAHGLTPAQVVAIASHDGGKQALETVQRLLPVLCQDHGLTPDQVVAIASNIGGKQALETVQRLLPVLCQDHGLTPEQVVAIASNIGGKQALETVQRLLPVLCQAHGLTPDQVVAIASNIGGKQALETVQRLLPVLCQAHGLTPAQVVAIASNNGGKQALETVQRLLPVLCQDHGLTPEQVVAIASNNGGRPALESIVAQLSRPDPALAALTNDHLVALACLGGRPAMDAVKKGLPHAPELIRSSGGSGGSGGSTNLSDIIEKETGKQLVIQESILMLPEEVEEVIGNKPESDILVHTAYDESTDENVMLLTSDAPEYKPWALVIQDSNGENKIKMLSGGSGGSGGSTNLSDIIEKETGKQLVIQESILMLPEEVEEVIGNKPESDILVHTAYDESTDENVMLLTSDAPEYKPWALVIQDSNGENKIKMLSGGSKRTADGSEFEPKKKRKV

SEQ ID NO: 137 - DNA, 3987 bp, Artificial Sequence
  ABE8e-135-47-NC
atgaagcgcaccgccgacggctctgagttcgagagccccaagaagaagcggaaggtgtctgaggtggagttttcccacgagtattggatgagacatgcactgaccctggcaaagagggcacgcgatgagagggaagtccctgtcggcgccgtgctggtgctgaacaacagagtgatcggcgagggatggaacagggcaatcggcctgcacgaccctacagcccatgccgaaattatggccctgaggcagggaggcctggtcatgcagaactaccgcctgattgacgccaccctgtacgtgacattcgagccttgcgtgatgtgcgccggcgcaatgatccacagcaggatcggaagggtggtgtttggctggcgcaactcaaaaagaggagcagcaggctccctgatgaacgtgctgaactacccaggcatgaatcaccgggtcgaaattaccgagggaatcctggcagatgaatgtgccgccctgctgtgcgatttctatcggatgcccagacaggtgttcaatgctcagaagaaggcccagagctccatcaactctggaggatcctctggaggaagctccggaagcgagacaccaggcacatctgagagcgccacaccagagtctagcggcggctcctctggaggatcctacacccgggtgggaagcggatccggatctggaagcatcaccaggaccacaaaccctcgcaatgtggtgccaaagatctacatgtccgccggctctatccctctgaccacacacatcacaaacagcatccagccaaccctgtggacaatcggatccatcaatggagtggcaccactggccaagtctatcaagctgggcatccctgtgaccggcagcgcctacacagaccagaccacagccatggtgcggaagaaggtgagcgtgttcatgggcagcggatctggaagcggatctagcatgaccgcggtcatggcttcctcccctccaaagaaaaagagaaaggttgcggccgctgactacaaggatgacgacgataaaagttggaaggacgcaagtggttggtctagaatgcatgcggccccgcgacggcgtgctgcgcaaccctccgacgcttcgccggccgcgcaggtggatctacgcacgctcggctacagtcagcagcagcaagagaagatcaaaccgaaggtgcgttcgacagtggcgcagcaccacgaggcactggtgggccatgggtttacacacgcgcacatcgttgcgctcagccaacacccggcagcgttagggaccgtcgctgtcacgtatcagcacataatcacggcgttgccagaggcgacacacgaagacatcgttggcgtcggcaaacagtggtccggcgcacgcgccctggaggccttgctcacggatgcgggggagttgagaggtccgccgttacagttggacacaggccaacttgtgaagattgcaaaacgtggcggcgtgaccgcaatggaggcagtgcatgcatcgcgcaatgcgctcacgggagcacccctcaacctgacccccgaccaggttgtcgctattgctagtaacggcggaggcaaacaggcgctggaaacagttcagcgcctcttgccggtcttgtgtcaggaccacggcctgaccccagaacaagttgtcgcgattgcaagcaacaacggaggcaaacaagccttagaaacagtccagagattgttgccggtgctgtgccaagcccacggcctgaccccggaccaggtggttgcaatcgcgtcacacgatgggggaaagcaggccctagaaaccgttcagcgactcctgcccgtcctgtgccaggcccacggcctgaccccagcccaagttgtcgcgattgcaagcaacaacggaggcaaacaagccttagaaacagtccagagattgttgccggtgctgtgccaagaccacggcctgaccccggaccaggtggttgcaatcgcgtcacacgatgggggaaagcaggccctagaaaccgttcagcgactcctgcccgtcctgtgccaggaccacggcctgaccccagaacaagttgtcgcgattgcaagcaacaacggaggcaaacaagccttagaaacagtccagagattgttgccggtgctgtgccaagcccacggcctgacccccgaccaggttgtcgctattgctagtaacggcggaggcaaacaggcgctggaaacagttcagcgcctcttgccggtcttgtgtcaggcccacggcctgaccccagcccaggttgtggccatcgccagcaacataggtggcaagcaggccctcgaaaccgtccagagactgttaccggttctctgccaggaccacggcctgacccccgaccaggttgtcgctattgctagtaacggcggaggcaaacaggcgctggaaacagttcagcgcctcttgccggtcttgtgtcaggaccacggcctgaccccagaacaggttgtggccatcgccagcaacataggtggcaagcaggccctcgaaaccgtccagagactgttaccggttctctgccaggcccacggcctgaccccagaccaagttgtcgcgattgcaagcaacaacggaggcaaacaagccttagaaacagtccagagattgttgcctgtgctgtgccaagcccacggcctgacccccgcccaggttgtcgctattgctagtaacggcggaggcaaacaggcgctggaaacagttcagcgcctcttgccggtcttgtgtcaggaccacggcctgaccccggaccaggtggttgcaatcgcgtcacacgatgggggaaagcaggccctagaaaccgttcagcgactcctgcccgtcctgtgccaggaccacggcctgaccccagaacaagttgtcgcgattgcaagcaacaacggaggcaaacaagccttagaaacagtccagagattgttgccggtgctgtgccaagcccacggcctgaccccggaccaggtggttgcaatcgcgtcacacgatgggggaaagcaggccctagaaaccgttcagcgactcctgcccgtcctgtgccaggcccacggcctgaccccagcccaagttgtcgcgattgcaagcaacaacggaggcaaacaagccttagaaacagtccagagattgttgccggtgctgtgccaagaccacggcctgacccctgagcaggtagtggctattgcatccaacaacgggggcagacccgcactggagtcaatcgtggcccagctttcgaggccggaccccgcgctggccgcactcactaatgatcatcttgtagcgctggcctgcctcggcggacgtcctgccatggatgcagtgaaaaagggattgccgcacgcgccggaattgatcagatcctccggaggatctggaggaagcggaggatccaccaacctgtctgacatcatcgagaaggagacaggcaagcagctggtcatccaggagagcatcctgatgctgcccgaggaggtggaggaagtgatcggcaacaagcctgagtccgatatcctggtgcacaccgcctacgacgagtccacagatgagaatgtgatgctgctgacctctgacgccccagagtataagccctgggccctggtcatccaggatagcaacggcgagaataagatcaagatgctgtccggcggaagcggaggatccggaggctctaccaatctgtccgatattattgaaaaagagacaggcaagcaactggtcatccaggagtctatcctgatgctgccagaagaagtcgaagaagtgatcggaaacaagcccgaaagcgacatcctggtccatactgcctacgacgagagtaccgacgaaaatgtgatgttactgacctccgacgcccctgagtataagccatgggctctggtcatccaggactccaatggagaaaataagatcaagatgttaagcggcggctccaagagaacagccgacggctccgagttcgagcccaagaagaagcggaaagtg

SEQ ID NO: 138 - protein, 1329 aa, Artificial Sequence
  ABE8e-135-47-NC
MKRTADGSEFESPKKKRKVSEVEFSHEYWMRHALTLAKRARDEREVPVGAVLVLNNRVIGEGWNRAIGLHDPTAHAEIMALRQGGLVMQNYRLIDATLYVTFEPCVMCAGAMIHSRIGRVVFGWRNSKRGAAGSLMNVLNYPGMNHRVEITEGILADECAALLCDFYRMPRQVFNAQKKAQSSINSGGSSGGSSGSETPGTSESATPESSGGSSGGSYTRVGSGSGSGSITRTTNPRNVVPKIYMSAGSIPLTTHITNSIQPTLWTIGSINGVAPLAKSIKLGIPVTGSAYTDQTTAMVRKKVSVFMGSGSGSGSSMTAVMASSPPKKKRKVAAADYKDDDDKSWKDASGWSRMHAAPRRRAAQPSDASPAAQVDLRTLGYSQQQQEKIKPKVRSTVAQHHEALVGHGFTHAHIVALSQHPAALGTVAVTYQHIITALPEATHEDIVGVGKQWSGARALEALLTDAGELRGPPLQLDTGQLVKIAKRGGVTAMEAVHASRNALTGAPLNLTPDQVVAIASNGGGKQALETVQRLLPVLCQDHGLTPEQVVAIASNNGGKQALETVQRLLPVLCQAHGLTPDQVVAIASHDGGKQALETVQRLLPVLCQAHGLTPAQVVAIASNNGGKQALETVQRLLPVLCQDHGLTPDQVVAIASHDGGKQALETVQRLLPVLCQDHGLTPEQVVAIASNNGGKQALETVQRLLPVLCQAHGLTPDQVVAIASNGGGKQALETVQRLLPVLCQAHGLTPAQVVAIASNIGGKQALETVQRLLPVLCQDHGLTPDQVVAIASNGGGKQALETVQRLLPVLCQDHGLTPEQVVAIASNIGGKQALETVQRLLPVLCQAHGLTPDQVVAIASNNGGKQALETVQRLLPVLCQAHGLTPAQVVAIASNGGGKQALETVQRLLPVLCQDHGLTPDQVVAIASHDGGKQALETVQRLLPVLCQDHGLTPEQVVAIASNNGGKQALETVQRLLPVLCQAHGLTPDQVVAIASHDGGKQALETVQRLLPVLCQAHGLTPAQVVAIASNNGGKQALETVQRLLPVLCQDHGLTPEQVVAIASNNGGRPALESIVAQLSRPDPALAALTNDHLVALACLGGRPAMDAVKKGLPHAPELIRSSGGSGGSGGSTNLSDIIEKETGKQLVIQESILMLPEEVEEVIGNKPESDILVHTAYDESTDENVMLLTSDAPEYKPWALVIQDSNGENKIKMLSGGSGGSGGSTNLSDIIEKETGKQLVIQESILMLPEEVEEVIGNKPESDILVHTAYDESTDENVMLLTSDAPEYKPWALVIQDSNGENKIKMLSGGSKRTADGSEFEPKKKRKV

SEQ ID NO: 139 - DNA, 4284 bp, Artificial Sequence
  ABE8e-234-47
atgaagcgcaccgccgacggctctgagttcgagagccccaagaagaagcggaaggtgtctgaggtggagttttcccacgagtattggatgagacatgcactgaccctggcaaagagggcacgcgatgagagggaagtccctgtcggcgccgtgctggtgctgaacaacagagtgatcggcgagggatggaacagggcaatcggcctgcacgaccctacagcccatgccgaaattatggccctgaggcagggaggcctggtcatgcagaactaccgcctgattgacgccaccctgtacgtgacattcgagccttgcgtgatgtgcgccggcgcaatgatccacagcaggatcggaagggtggtgtttggctggcgcaactcaaaaagaggagcagcaggctccctgatgaacgtgctgaactacccaggcatgaatcaccgggtcgaaattaccgagggaatcctggcagatgaatgtgccgccctgctgtgcgatttctatcggatgcccagacaggtgttcaatgctcagaagaaggcccagagctccatcaactctggaggatcctctggaggaagctccggaagcgagacaccaggcacatctgagagcgccacaccagagtctagcggcggctcctctggaggatcctacacccgggtgggaagcggatccggatctggaagcatcaccaggaccacaaaccctcgcaatgtggtgccaaagatctacatgtccgccggctctatccctctgaccacacacatcacaaacagcatccagccaaccctgtggacaatcggatccatcaatggagtggcaccactggccaagtctatcaagctgggcatccctgtgaccggcagcgcctacacagaccagaccacagccatggtgcggaagaaggtgagcgtgttcatgggcagcggatctggaagcggatctagcatgaccggggtgggaagcggatccggatctggaagcatcaccaggaccacaaaccctcgcaatgtggtgccaaagatctacatgtccgccggctctatccctctgaccacacacatcacaaacagcatccagccaaccctgtggacaatcggatccatcaatggagtggcaccactggccaagtctatcaagctgggcatccctgtgaccggcagcgcctacacagaccagaccacagccatggtgcggaagaaggtgagcgtgttcatgggcagcggatctggaagcggatctagcatgaccgcggtcatggcttcctcccctccaaagaaaaagagaaaggttgcggccgctgactacaaggatgacgacgataaaagttggaaggacgcaagtggttggtctagaatgcatgcggccccgcgacggcgtgctgcgcaaccctccgacgcttcgccggccgcgcaggtggatctacgcacgctcggctacagtcagcagcagcaagagaagatcaaaccgaaggtgcgttcgacagtggcgcagcaccacgaggcactggtgggccatgggtttacacacgcgcacatcgttgcgctcagccaacacccggcagcgttagggaccgtcgctgtcacgtatcagcacataatcacggcgttgccagaggcgacacacgaagacatcgttggcgtcggcaaacagtggtccggcgcacgcgccctggaggccttgctcacggatgcgggggagttgagaggtccgccgttacagttggacacaggccaacttgtgaagattgcaaaacgtggcggcgtgaccgcaatggaggcagtgcatgcatcgcgcaatgcgctcacgggagcacccctcaacctgaccccagaccaggttgtggccatcgccagcaacataggtggcaagcaggccctcgaaaccgtccagagactgttaccggttctctgccaggaccacggcctgaccccggaacaggtggttgcaatcgcgtcacacgatgggggaaagcaggccctagaaaccgttcagcgactcctgcccgtcctgtgccaggcccacggcctgaccccagaccaggttgtggccatcgccagcaacataggtggcaagcaggccctcgaaaccgtccagagactgttaccggttctctgccaggcccacggcctgaccccagcccaagttgtcgcgattgcaagcaacaacggaggcaaacaagccttagaaacagtccagagattgttgccggtgctgtgccaagaccacggcctgaccccagaccaggttgtggccatcgccagcaacataggtggcaagcaggccctcgaaaccgtccagagactgttaccggttctctgccaggaccacggcctgaccccagaacaggttgtggccatcgccagcaacataggtggcaagcaggccctcgaaaccgtccagagactgttaccggttctctgccaggcccacggcctgaccccagaccaagttgtcgcgattgcaagcaacaacggaggcaaacaagccttagaaacagtccagagattgttgcctgtgctgtgccaagcccacggcctgaccccggcccaggtggttgcaatcgcgtcacacgatgggggaaagcaggccctagaaaccgttcagcgactcctgcccgtcctgtgccaggaccacggcctgaccccagaccaagttgtcgcgattgcaagcaacaacggaggcaaacaagccttagaaacagtccagagattgttgccggtgctgtgccaagaccacggcctgaccccagaacaagttgtcgcgattgcaagcaacaacggaggcaaacaagccttagaaacagtccagagattgttgccggtgctgtgccaagcccacggcctgaccccagaccaagttgtcgcgattgcaagcaacaacggaggcaaacaagccttagaaacagtccagagattgttgcctgtgctgtgccaagcccacggcctgaccccggcccaggtggttgcaatcgcgtcacacgatgggggaaagcaggccctagaaaccgttcagcgactcctgcccgtcctgtgccaggaccacggcctgaccccagaccaggttgtggccatcgccagcaacataggtggcaagcaggccctcgaaaccgtccagagactgttaccggttctctgccaggaccacggcctgaccccagaacaggttgtggccatcgccagcaacataggtggcaagcaggccctcgaaaccgtccagagactgttaccggttctctgccaggcccacggcctgaccccagaccaggttgtggccatcgccagcaacataggtggcaagcaggccctcgaaaccgtccagagactgttaccggttctctgccaggcccacggcctgaccccagcccaagttgtcgcgattgcaagcaacaacggaggcaaacaagccttagaaacagtccagagattgttgccggtgctgtgccaagaccacggcctgacccctgagcaggtagtggctattgcatccaacaacgggggcagacccgcactggagtcaatcgtggcccagctttcgaggccggaccccgcgctggccgcactcactaatgatcatcttgtagcgctggcctgcctcggcggacgtcctgccatggatgcagtgaaaaagggattgccgcacgcgccggaattgatcagatcctccggaggatctggaggaagcggaggatccaccaacctgtctgacatcatcgagaaggagacaggcaagcagctggtcatccaggagagcatcctgatgctgcccgaggaggtggaggaagtgatcggcaacaagcctgagtccgatatcctggtgcacaccgcctacgacgagtccacagatgagaatgtgatgctgctgacctctgacgccccagagtataagccctgggccctggtcatccaggatagcaacggcgagaataagatcaagatgctgtccggcggaagcggaggatccggaggctctaccaatctgtccgatattattgaaaaagagacaggcaagcaactggtcatccaggagtctatcctgatgctgccagaagaagtcgaagaagtgatcggaaacaagcccgaaagcgacatcctggtccatactgcctacgacgagagtaccgacgaaaatgtgatgttactgacctccgacgcccctgagtataagccatgggctctggtcatccaggactccaatggagaaaataagatcaagatgttaagcggcggctccaagagaacagccgacggctccgagttcgagcccaagaagaagcggaaagtg

SEQ ID NO: 140 - protein, 1428 aa, Artificial Sequence
  ABE8e-234-47
MKRTADGSEFESPKKKRKVSEVEFSHEYWMRHALTLAKRARDEREVPVGAVLVLNNRVIGEGWNRAIGLHDPTAHAEIMALRQGGLVMQNYRLIDATLYVTFEPCVMCAGAMIHSRIGRVVFGWRNSKRGAAGSLMNVLNYPGMNHRVEITEGILADECAALLCDFYRMPRQVFNAQKKAQSSINSGGSSGGSSGSETPGTSESATPESSGGSSGGSYTRVGSGSGSGSITRTTNPRNVVPKIYMSAGSIPLTTHITNSIQPTLWTIGSINGVAPLAKSIKLGIPVTGSAYTDQTTAMVRKKVSVFMGSGSGSGSSMTGVGSGSGSGSITRTTNPRNVVPKIYMSAGSIPLTTHITNSIQPTLWTIGSINGVAPLAKSIKLGIPVTGSAYTDQTTAMVRKKVSVFMGSGSGSGSSMTAVMASSPPKKKRKVAAADYKDDDDKSWKDASGWSRMHAAPRRRAAQPSDASPAAQVDLRTLGYSQQQQEKIKPKVRSTVAQHHEALVGHGFTHAHIVALSQHPAALGTVAVTYQHIITALPEATHEDIVGVGKQWSGARALEALLTDAGELRGPPLQLDTGQLVKIAKRGGVTAMEAVHASRNALTGAPLNLTPDQVVAIASNIGGKQALETVQRLLPVLCQDHGLTPEQVVAIASHDGGKQALETVQRLLPVLCQAHGLTPDQVVAIASNIGGKQALETVQRLLPVLCQAHGLTPAQVVAIASNNGGKQALETVQRLLPVLCQDHGLTPDQVVAIASNIGGKQALETVQRLLPVLCQDHGLTPEQVVAIASNIGGKQALETVQRLLPVLCQAHGLTPDQVVAIASNNGGKQALETVQRLLPVLCQAHGLTPAQVVAIASHDGGKQALETVQRLLPVLCQDHGLTPDQVVAIASNNGGKQALETVQRLLPVLCQDHGLTPEQVVAIASNNGGKQALETVQRLLPVLCQAHGLTPDQVVAIASNNGGKQALETVQRLLPVLCQAHGLTPAQVVAIASHDGGKQALETVQRLLPVLCQDHGLTPDQVVAIASNIGGKQALETVQRLLPVLCQDHGLTPEQVVAIASNIGGKQALETVQRLLPVLCQAHGLTPDQVVAIASNIGGKQALETVQRLLPVLCQAHGLTPAQVVAIASNNGGKQALETVQRLLPVLCQDHGLTPEQVVAIASNNGGRPALESIVAQLSRPDPALAALTNDHLVALACLGGRPAMDAVKKGLPHAPELIRSSGGSGGSGGSTNLSDIIEKETGKQLVIQESILMLPEEVEEVIGNKPESDILVHTAYDESTDENVMLLTSDAPEYKPWALVIQDSNGENKIKMLSGGSGGSGGSTNLSDIIEKETGKQLVIQESILMLPEEVEEVIGNKPESDILVHTAYDESTDENVMLLTSDAPEYKPWALVIQDSNGENKIKMLSGGSKRTADGSEFEPKKKRKV

SEQ ID NO: 141 - DNA, 4284 bp, Artificial Sequence
  ABE8e-234-47-NC
atgaagcgcaccgccgacggctctgagttcgagagccccaagaagaagcggaaggtgtctgaggtggagttttcccacgagtattggatgagacatgcactgaccctggcaaagagggcacgcgatgagagggaagtccctgtcggcgccgtgctggtgctgaacaacagagtgatcggcgagggatggaacagggcaatcggcctgcacgaccctacagcccatgccgaaattatggccctgaggcagggaggcctggtcatgcagaactaccgcctgattgacgccaccctgtacgtgacattcgagccttgcgtgatgtgcgccggcgcaatgatccacagcaggatcggaagggtggtgtttggctggcgcaactcaaaaagaggagcagcaggctccctgatgaacgtgctgaactacccaggcatgaatcaccgggtcgaaattaccgagggaatcctggcagatgaatgtgccgccctgctgtgcgatttctatcggatgcccagacaggtgttcaatgctcagaagaaggcccagagctccatcaactctggaggatcctctggaggaagctccggaagcgagacaccaggcacatctgagagcgccacaccagagtctagcggcggctcctctggaggatcctacacccgggtgggaagcggatccggatctggaagcatcaccaggaccacaaaccctcgcaatgtggtgccaaagatctacatgtccgccggctctatccctctgaccacacacatcacaaacagcatccagccaaccctgtggacaatcggatccatcaatggagtggcaccactggccaagtctatcaagctgggcatccctgtgaccggcagcgcctacacagaccagaccacagccatggtgcggaagaaggtgagcgtgttcatgggcagcggatctggaagcggatctagcatgaccggggtgggaagcggatccggatctggaagcatcaccaggaccacaaaccctcgcaatgtggtgccaaagatctacatgtccgccggctctatccctctgaccacacacatcacaaacagcatccagccaaccctgtggacaatcggatccatcaatggagtggcaccactggccaagtctatcaagctgggcatccctgtgaccggcagcgcctacacagaccagaccacagccatggtgcggaagaaggtgagcgtgttcatgggcagcggatctggaagcggatctagcatgaccgcggtcatggcttcctcccctccaaagaaaaagagaaaggttgcggccgctgactacaaggatgacgacgataaaagttggaaggacgcaagtggttggtctagaatgcatgcggccccgcgacggcgtgctgcgcaaccctccgacgcttcgccggccgcgcaggtggatctacgcacgctcggctacagtcagcagcagcaagagaagatcaaaccgaaggtgcgttcgacagtggcgcagcaccacgaggcactggtgggccatgggtttacacacgcgcacatcgttgcgctcagccaacacccggcagcgttagggaccgtcgctgtcacgtatcagcacataatcacggcgttgccagaggcgacacacgaagacatcgttggcgtcggcaaacagtggtccggcgcacgcgccctggaggccttgctcacggatgcgggggagttgagaggtccgccgttacagttggacacaggccaacttgtgaagattgcaaaacgtggcggcgtgaccgcaatggaggcagtgcatgcatcgcgcaatgcgctcacgggagcacccctcaacctgacccccgaccaggttgtcgctattgctagtaacggcggaggcaaacaggcgctggaaacagttcagcgcctcttgccggtcttgtgtcaggaccacggcctgaccccagaacaagttgtcgcgattgcaagcaacaacggaggcaaacaagccttagaaacagtccagagattgttgccggtgctgtgccaagcccacggcctgaccccggaccaggtggttgcaatcgcgtcacacgatgggggaaagcaggccctagaaaccgttcagcgactcctgcccgtcctgtgccaggcccacggcctgaccccagcccaagttgtcgcgattgcaagcaacaacggaggcaaacaagccttagaaacagtccagagattgttgccggtgctgtgccaagaccacggcctgaccccggaccaggtggttgcaatcgcgtcacacgatgggggaaagcaggccctagaaaccgttcagcgactcctgcccgtcctgtgccaggaccacggcctgaccccagaacaagttgtcgcgattgcaagcaacaacggaggcaaacaagccttagaaacagtccagagattgttgccggtgctgtgccaagcccacggcctgacccccgaccaggttgtcgctattgctagtaacggcggaggcaaacaggcgctggaaacagttcagcgcctcttgccggtcttgtgtcaggcccacggcctgaccccagcccaggttgtggccatcgccagcaacataggtggcaagcaggccctcgaaaccgtccagagactgttaccggttctctgccaggaccacggcctgacccccgaccaggttgtcgctattgctagtaacggcggaggcaaacaggcgctggaaacagttcagcgcctcttgccggtcttgtgtcaggaccacggcctgaccccagaacaggttgtggccatcgccagcaacataggtggcaagcaggccctcgaaaccgtccagagactgttaccggttctctgccaggcccacggcctgaccccagaccaagttgtcgcgattgcaagcaacaacggaggcaaacaagccttagaaacagtccagagattgttgcctgtgctgtgccaagcccacggcctgacccccgcccaggttgtcgctattgctagtaacggcggaggcaaacaggcgctggaaacagttcagcgcctcttgccggtcttgtgtcaggaccacggcctgaccccggaccaggtggttgcaatcgcgtcacacgatgggggaaagcaggccctagaaaccgttcagcgactcctgcccgtcctgtgccaggaccacggcctgaccccagaacaagttgtcgcgattgcaagcaacaacggaggcaaacaagccttagaaacagtccagagattgttgccggtgctgtgccaagcccacggcctgaccccggaccaggtggttgcaatcgcgtcacacgatgggggaaagcaggccctagaaaccgttcagcgactcctgcccgtcctgtgccaggcccacggcctgaccccagcccaagttgtcgcgattgcaagcaacaacggaggcaaacaagccttagaaacagtccagagattgttgccggtgctgtgccaagaccacggcctgacccctgagcaggtagtggctattgcatccaacaacgggggcagacccgcactggagtcaatcgtggcccagctttcgaggccggaccccgcgctggccgcactcactaatgatcatcttgtagcgctggcctgcctcggcggacgtcctgccatggatgcagtgaaaaagggattgccgcacgcgccggaattgatcagatcctccggaggatctggaggaagcggaggatccaccaacctgtctgacatcatcgagaaggagacaggcaagcagctggtcatccaggagagcatcctgatgctgcccgaggaggtggaggaagtgatcggcaacaagcctgagtccgatatcctggtgcacaccgcctacgacgagtccacagatgagaatgtgatgctgctgacctctgacgccccagagtataagccctgggccctggtcatccaggatagcaacggcgagaataagatcaagatgctgtccggcggaagcggaggatccggaggctctaccaatctgtccgatattattgaaaaagagacaggcaagcaactggtcatccaggagtctatcctgatgctgccagaagaagtcgaagaagtgatcggaaacaagcccgaaagcgacatcctggtccatactgcctacgacgagagtaccgacgaaaatgtgatgttactgacctccgacgcccctgagtataagccatgggctctggtcatccaggactccaatggagaaaataagatcaagatgttaagcggcggctccaagagaacagccgacggctccgagttcgagcccaagaagaagcggaaagtg

SEQ ID NO: 142 - protein, 1428 aa, Artificial Sequence
  ABE8e-234-47-NC
MKRTADGSEFESPKKKRKVSEVEFSHEYWMRHALTLAKRARDEREVPVGAVLVLNNRVIGEGWNRAIGLHDPTAHAEIMALRQGGLVMQNYRLIDATLYVTFEPCVMCAGAMIHSRIGRVVFGWRNSKRGAAGSLMNVLNYPGMNHRVEITEGILADECAALLCDFYRMPRQVFNAQKKAQSSINSGGSSGGSSGSETPGTSESATPESSGGSSGGSYTRVGSGSGSGSITRTTNPRNVVPKIYMSAGSIPLTTHITNSIQPTLWTIGSINGVAPLAKSIKLGIPVTGSAYTDQTTAMVRKKVSVFMGSGSGSGSSMTGVGSGSGSGSITRTTNPRNVVPKIYMSAGSIPLTTHITNSIQPTLWTIGSINGVAPLAKSIKLGIPVTGSAYTDQTTAMVRKKVSVFMGSGSGSGSSMTAVMASSPPKKKRKVAAADYKDDDDKSWKDASGWSRMHAAPRRRAAQPSDASPAAQVDLRTLGYSQQQQEKIKPKVRSTVAQHHEALVGHGFTHAHIVALSQHPAALGTVAVTYQHIITALPEATHEDIVGVGKQWSGARALEALLTDAGELRGPPLQLDTGQLVKIAKRGGVTAMEAVHASRNALTGAPLNLTPDQVVAIASNGGGKQALETVQRLLPVLCQDHGLTPEQVVAIASNNGGKQALETVQRLLPVLCQAHGLTPDQVVAIASHDGGKQALETVQRLLPVLCQAHGLTPAQVVAIASNNGGKQALETVQRLLPVLCQDHGLTPDQVVAIASHDGGKQALETVQRLLPVLCQDHGLTPEQVVAIASNNGGKQALETVQRLLPVLCQAHGLTPDQVVAIASNGGGKQALETVQRLLPVLCQAHGLTPAQVVAIASNIGGKQALETVQRLLPVLCQDHGLTPDQVVAIASNGGGKQALETVQRLLPVLCQDHGLTPEQVVAIASNIGGKQALETVQRLLPVLCQAHGLTPDQVVAIASNNGGKQALETVQRLLPVLCQAHGLTPAQVVAIASNGGGKQALETVQRLLPVLCQDHGLTPDQVVAIASHDGGKQALETVQRLLPVLCQDHGLTPEQVVAIASNNGGKQALETVQRLLPVLCQAHGLTPDQVVAIASHDGGKQALETVQRLLPVLCQAHGLTPAQVVAIASNNGGKQALETVQRLLPVLCQDHGLTPEQVVAIASNNGGRPALESIVAQLSRPDPALAALTNDHLVALACLGGRPAMDAVKKGLPHAPELIRSSGGSGGSGGSTNLSDIIEKETGKQLVIQESILMLPEEVEEVIGNKPESDILVHTAYDESTDENVMLLTSDAPEYKPWALVIQDSNGENKIKMLSGGSGGSGGSTNLSDIIEKETGKQLVIQESILMLPEEVEEVIGNKPESDILVHTAYDESTDENVMLLTSDAPEYKPWALVIQDSNGENKIKMLSGGSKRTADGSEFEPKKKRKV

SEQ ID NO: 143 - DNA, 18 bp, Homo sapiens
tgagcccagaaggggaca

SEQ ID NO: 144 - DNA, 18 bp, Homo sapiens
tagcttggtccaacctgt

SEQ ID NO: 145 - DNA, 18 bp, Homo sapiens
tggtcaacctgttagagc

SEQ ID NO: 146 - DNA, 18 bp, Homo sapiens
tctaacaggttggaccaa

SEQ ID NO: 147 - DNA, 18 bp, Homo sapiens
tgcagtagctctaacagg

SEQ ID NO: 148 - DNA, 18 bp, Homo sapiens
tctgccgttactgccctg

SEQ ID NO: 149 - DNA, 18 bp, Homo sapiens
tttgccacactgagtgag

SEQ ID NO: 150 - DNA, 17 bp, Homo sapiens
tgccacactgagtgagc

SEQ ID NO: 151 - DNA, 4044 bp, Artificial Sequence
  WT(AS3)-12-AID
atggactataaggaccacgacggagactacaaggatcatgatattgattacaaagacgatgacgataagatggccccaaagaagaagcggaaggtcggtatccacggagtcccagcagccgtagatttgagaactttgggatattcacagcagcagcaggaaaagatcaagcccaaagtgaggtcgacagtcgcgcagcatcacgaagcgctggtgggtcatgggtttacacatgcccacatcgtagccttgtcgcagcaccctgcagcccttggcacggtcgccgtcaagtaccaggacatgattgcggcgttgccggaagccacacatgaggcgatcgtcggtgtggggaaacagtggagcggagcccgagcgcttgaggccctgttgacggtcgcgggagagctgagagggcctccccttcagctggacacgggccagttgctgaagatcgcgaagcggggaggagtcacggcggtcgaggcggtacacgcgtggcgcaatgcgctcacgggagcacccctcaacctgaccccagaccaagttgtcgcgattgcaagcaacaacggaggcaaacaagccttagaaacagtccagagattgttgccggtgctgtgccaagaccacggcctgaccccagaacaggttgtggccatcgccagcaacataggtggcaagcaggccctcgaaaccgtccagagactgttaccggttctctgccaggcccacggcctgaccccagaccaagttgtcgcgattgcaagcaacaacggaggcaaacaagccttagaaacagtccagagattgttgcctgtgctgtgccaagcccacggcctgaccccggcccaggtggttgcaatcgcgtcacacgatgggggaaagcaggccctagaaaccgttcagcgactcctgcccgtcctgtgccaggaccacggcctgaccccggaccaggtggttgcaatcgcgtcacacgatgggggaaagcaggccctagaaaccgttcagcgactcctgcccgtcctgtgccaggaccacggcctgaccccggaacaggtggttgcaatcgcgtcacacgatgggggaaagcaggccctagaaaccgttcagcgactcctgcccgtcctgtgccaggcccacggcctgaccccagaccaggttgtggccatcgccagcaacataggtggcaagcaggccctcgaaaccgtccagagactgttaccggttctctgccaggcccacggcctgaccccagcccaagttgtcgcgattgcaagcaacaacggaggcaaacaagccttagaaacagtccagagattgttgccggtgctgtgccaagaccacggcctgaccccagaccaggttgtggccatcgccagcaacataggtggcaagcaggccctcgaaaccgtccagagactgttaccggttctctgccaggaccacggcctgaccccagaacaggttgtggccatcgccagcaacataggtggcaagcaggccctcgaaaccgtccagagactgttaccggttctctgccaggcccacggcctgaccccagaccaagttgtcgcgattgcaagcaacaacggaggcaaacaagccttagaaacagtccagagattgttgcctgtgctgtgccaagcccacggcctgaccccagcccaagttgtcgcgattgcaagcaacaacggaggcaaacaagccttagaaacagtccagagattgttgccggtgctgtgccaagaccacggcctgaccccagaccaagttgtcgcgattgcaagcaacaacggaggcaaacaagccttagaaacagtccagagattgttgccggtgctgtgccaagaccacggcctgaccccagaacaagttgtcgcgattgcaagcaacaacggaggcaaacaagccttagaaacagtccagagattgttgccggtgctgtgccaagcccacggcctgaccccagaccaggttgtggccatcgccagcaacataggtggcaagcaggccctcgaaaccgtccagagactgttaccggttctctgccaggcccacggcctgaccccggcccaggtggttgcaatcgcgtcacacgatgggggaaagcaggccctagaaaccgttcagcgactcctgcccgtcctgtgccaggaccacggcctgacccctgagcaggtagtggctattgcatccaacatagggggcagacccgcactggagtcaatcgtggcccagctctcgaggccggaccccgcgctggccgcactcactaatgatcatcttgtagcgctggcctgcctcggcggacgacccgccttggatgcggtgaagaaggggctcccgcacgcgcctgcattgattaagcggaccaacagaaggatccccgagaggacatcacatcgagtggcagatcacgcgcaagtggtccgcgtgctcggattcttccagtgtcactcccaccccgcacaagcgttcgatgacgccatgactcaatttggtatgtcgagacacggactgctgcagctctttcgtagagtcggtgtcacagaactggaggcccgctcgggcacactgcctcccgcctcccagcggtgggacaggattctccaagcgagcggtatgaaacgcgcgaagccttcacctacgtcaactcagacacctgaccaggcgagccttcatgcgttcgcagactcgctggagagggatttggacgcgccctcgcccatgcatgaaggggaccaaactcgcgcgtcagccagcgctagccccaagaagaagagaaaggtggaggccagcatgaccgacgccgagtatgtgcggatccacgagaagctggatatctacaccttcaagaagcagttctttaacaataagaagtccgtgtctcacagatgctatgtgctgttcgagctgaagcggagaggagagaggcgcgcatgtttttggggctacgccgtgaataagccacagagcggaaccgagaggggaatccacgccgagatcttctccatcaggaaagtggaggagtatctgcgcgacaaccctggccagtttacaatcaattggtacagctcctggagcccatgcgccgattgtgccgagaagatcctggagtggtataaccaggagctgagaggcaatggccacaccctgaagatctgggcctgcaagctgtactatgagaagaacgcccggaatcagatcggcctgtggaacctgagagacaatggcgtgggcctgaacgtgatggtgtctgagcactaccagtgctgtaggaagatcttcatccagtctagccacaatcagctgaacgagaatcgctggctggagaagacactgaagagggccgagaagtggcgcagcgagctgtccatcatgatccaggtgaagatcctgcacaccacaaagagcccagcagtgggatccggaggatctggaggaagcggaggatccaccaacctgtctgacatcatcgagaaggagacaggcaagcagctggtcatccaggagagcatcctgatgctgcccgaggaggtggaggaagtgatcggcaacaagcctgagtccgatatcctggtgcacaccgcctacgacgagtccacagatgagaatgtgatgctgctgacctctgacgccccagagtataagccctgggccctggtcatccaggatagcaacggcgagaataagatcaagatgctgtccggcggaagcggaggatccggaggctctaccaatctgtccgatattattgaaaaagagacaggcaagcaactggtcatccaggagtctatcctgatgctgccagaagaagtcgaagaagtgatcggaaacaagcccgaaagcgacatcctggtccatactgcctacgacgagagtaccgacgaaaatgtgatgttactgacctccgacgcccctgagtataagccatgggctctggtcatccaggactccaatggagaaaataagatcaagatgttaagcggcggctccaagagaacagccgacggctccgagttcgagcccaagaagaagcggaaagtg

SEQ ID NO: 152 - protein, 1348 aa, Artificial Sequence
  WT(AS3)-12-AID
MDYKDHDGDYKDHDIDYKDDDDKMAPKKKRKVGIHGVPAAVDLRTLGYSQQQQEKIKPKVRSTVAQHHEALVGHGFTHAHIVALSQHPAALGTVAVKYQDMIAALPEATHEAIVGVGKQWSGARALEALLTVAGELRGPPLQLDTGQLLKIAKRGGVTAVEAVHAWRNALTGAPLNLTPDQVVAIASNNGGKQALETVQRLLPVLCQDHGLTPEQVVAIASNIGGKQALETVQRLLPVLCQAHGLTPDQVVAIASNNGGKQALETVQRLLPVLCQAHGLTPAQVVAIASHDGGKQALETVQRLLPVLCQDHGLTPDQVVAIASHDGGKQALETVQRLLPVLCQDHGLTPEQVVAIASHDGGKQALETVQRLLPVLCQAHGLTPDQVVAIASNIGGKQALETVQRLLPVLCQAHGLTPAQVVAIASNNGGKQALETVQRLLPVLCQDHGLTPDQVVAIASNIGGKQALETVQRLLPVLCQDHGLTPEQVVAIASNIGGKQALETVQRLLPVLCQAHGLTPDQVVAIASNNGGKQALETVQRLLPVLCQAHGLTPAQVVAIASNNGGKQALETVQRLLPVLCQDHGLTPDQVVAIASNNGGKQALETVQRLLPVLCQDHGLTPEQVVAIASNNGGKQALETVQRLLPVLCQAHGLTPDQVVAIASNIGGKQALETVQRLLPVLCQAHGLTPAQVVAIASHDGGKQALETVQRLLPVLCQDHGLTPEQVVAIASNIGGRPALESIVAQLSRPDPALAALTNDHLVALACLGGRPALDAVKKGLPHAPALIKRTNRRIPERTSHRVADHAQVVRVLGFFQCHSHPAQAFDDAMTQFGMSRHGLLQLFRRVGVTELEARSGTLPPASQRWDRILQASGMKRAKPSPTSTQTPDQASLHAFADSLERDLDAPSPMHEGDQTRASASASPKKKRKVEASMTDAEYVRIHEKLDIYTFKKQFFNNKKSVSHRCYVLFELKRRGERRACFWGYAVNKPQSGTERGIHAEIFSIRKVEEYLRDNPGQFTINWYSSWSPCADCAEKILEWYNQELRGNGHTLKIWACKLYYEKNARNQIGLWNLRDNGVGLNVMVSEHYQCCRKIFIQSSHNQLNENRWLEKTLKRAEKWRSELSIMIQVKILHTTKSPAVGSGGSGGSGGSTNLSDIIEKETGKQLVIQESILMLPEEVEEVIGNKPESDILVHTAYDESTDENVMLLTSDAPEYKPWALVIQDSNGENKIKMLSGGSGGSGGSTNLSDIIEKETGKQLVIQESILMLPEEVEEVIGNKPESDILVHTAYDESTDENVMLLTSDAPEYKPWALVIQDSNGENKIKMLSGGSKRTADGSEFEPKKKRKV

SEQ ID NO: 153 - DNA, 3966 bp, Artificial Sequence
  47(AS3)-104-AID
atggcttcctcccctccaaagaaaaagagaaaggttgcggccgctgactacaaggatgacgacgataaaagttggaaggacgcaagtggttggtctagaatgcatgcggccccgcgacggcgtgctgcgcaaccctccgacgcttcgccggccgcgcaggtggatctacgcacgctcggctacagtcagcagcagcaagagaagatcaaaccgaaggtgcgttcgacagtggcgcagcaccacgaggcactggtgggccatgggtttacacacgcgcacatcgttgcgctcagccaacacccggcagcgttagggaccgtcgctgtcacgtatcagcacataatcacggcgttgccagaggcgacacacgaagacatcgttggcgtcggcaaacagtggtccggcgcacgcgccctggaggccttgctcacggatgcgggggagttgagaggtccgccgttacagttggacacaggccaacttgtgaagattgcaaaacgtggcggcgtgaccgcaatggaggcagtgcatgcatcgcgcaatgcgctcacgggagcacccctcaacctgaccccagaccaagttgtcgcgattgcaagcaacaacggaggcaaacaagccttagaaacagtccagagattgttgccggtgctgtgccaagaccacggcctgaccccagaacaggttgtggccatcgccagcaacataggtggcaagcaggccctcgaaaccgtccagagactgttaccggttctctgccaggcccacggcctgaccccagaccaagttgtcgcgattgcaagcaacaacggaggcaaacaagccttagaaacagtccagagattgttgcctgtgctgtgccaagcccacggcctgaccccggcccaggtggttgcaatcgcgtcacacgatgggggaaagcaggccctagaaaccgttcagcgactcctgcccgtcctgtgccaggaccacggcctgaccccggaccaggtggttgcaatcgcgtcacacgatgggggaaagcaggccctagaaaccgttcagcgactcctgcccgtcctgtgccaggaccacggcctgaccccggaacaggtggttgcaatcgcgtcacacgatgggggaaagcaggccctagaaaccgttcagcgactcctgcccgtcctgtgccaggcccacggcctgaccccagaccaggttgtggccatcgccagcaacataggtggcaagcaggccctcgaaaccgtccagagactgttaccggttctctgccaggcccacggcctgaccccagcccaagttgtcgcgattgcaagcaacaacggaggcaaacaagccttagaaacagtccagagattgttgccggtgctgtgccaagaccacggcctgaccccagaccaggttgtggccatcgccagcaacataggtggcaagcaggccctcgaaaccgtccagagactgttaccggttctctgccaggaccacggcctgaccccagaacaggttgtggccatcgccagcaacataggtggcaagcaggccctcgaaaccgtccagagactgttaccggttctctgccaggcccacggcctgaccccagaccaagttgtcgcgattgcaagcaacaacggaggcaaacaagccttagaaacagtccagagattgttgcctgtgctgtgccaagcccacggcctgaccccagcccaagttgtcgcgattgcaagcaacaacggaggcaaacaagccttagaaacagtccagagattgttgccggtgctgtgccaagaccacggcctgaccccagaccaagttgtcgcgattgcaagcaacaacggaggcaaacaagccttagaaacagtccagagattgttgccggtgctgtgccaagaccacggcctgaccccagaacaagttgtcgcgattgcaagcaacaacggaggcaaacaagccttagaaacagtccagagattgttgccggtgctgtgccaagcccacggcctgaccccagaccaggttgtggccatcgccagcaacataggtggcaagcaggccctcgaaaccgtccagagactgttaccggttctctgccaggcccacggcctgaccccggcccaggtggttgcaatcgcgtcacacgatgggggaaagcaggccctagaaaccgttcagcgactcctgcccgtcctgtgccaggaccacggcctgacccctgagcaggtagtggctattgcatccaacatagggggcagacccgcactggagtcaatcgtggcccagctttcgaggccggaccccgcgctggccgcactcactaatgatcatcttgtagcgctggcctgcctcggcggacgtcctgccatggatgcagtgaaaaagggattgccgcacgcgccggaattgatcagatccagcagggcagatcccaagaagaagcggaaagtaggaggaggaggaaccggaggaggaggctccgccgagtacgtgagggccctgttcgacttcaacggcaatgacgaggaggatctgccattcaagaagggcgacatcctgcggatcagagataagcccgaggagcagtggtggaacgccgaggactctgagggcaagcgcggcatgatcctggtgccttacgtggagaagtatagcggcgattacaaggaccacgatggcgactataaggatcacgacatcgattacaaggacgatgacgataagtctggcatgaccgacgccgagtatgtgcggatccacgagaagctggatatctacaccttcaagaagcagttctttaacaataagaagtccgtgtctcacagatgctatgtgctgttcgagctgaagcggagaggagagaggcgcgcatgtttttggggctacgccgtgaataagccacagagcggaaccgagaggggaatccacgccgagatcttctccatcaggaaagtggaggagtatctgcgcgacaaccctggccagtttacaatcaattggtacagctcctggagcccatgcgccgattgtgccgagaagatcctggagtggtataaccaggagctgagaggcaatggccacaccctgaagatctgggcctgcaagctgtactatgagaagaacgcccggaatcagatcggcctgtggaacctgagagacaatggcgtgggcctgaacgtgatggtgtctgagcactaccagtgctgtaggaagatcttcatccagtctagccacaatcagctgaacgagaatcgctggctggagaagacactgaagagggccgagaagtggcgcagcgagctgtccatcatgatccaggtgaagatcctgcacaccacaaagagcccagcagtgggatccggaggatctggaggaagcggaggatccaccaacctgtctgacatcatcgagaaggagacaggcaagcagctggtcatccaggagagcatcctgatgctgcccgaggaggtggaggaagtgatcggcaacaagcctgagtccgatatcctggtgcacaccgcctacgacgagtccacagatgagaatgtgatgctgctgacctctgacgccccagagtataagccctgggccctggtcatccaggatagcaacggcgagaataagatcaagatgctgtccggcggaagcggaggatccggaggctctaccaatctgtccgatattattgaaaaagagacaggcaagcaactggtcatccaggagtctatcctgatgctgccagaagaagtcgaagaagtgatcggaaacaagcccgaaagcgacatcctggtccatactgcctacgacgagagtaccgacgaaaatgtgatgttactgacctccgacgcccctgagtataagccatgggctctggtcatccaggactccaatggagaaaataagatcaagatgttaagcggcggctccaagagaacagccgacggctccgagttcgagcccaagaagaagcggaaagtg

SEQ ID NO: 154 - protein, 1322 aa, Artificial Sequence
  47(AS3)-104-AID
MASSPPKKKRKVAAADYKDDDDKSWKDASGWSRMHAAPRRRAAQPSDASPAAQVDLRTLGYSQQQQEKIKPKVRSTVAQHHEALVGHGFTHAHIVALSQHPAALGTVAVTYQHIITALPEATHEDIVGVGKQWSGARALEALLTDAGELRGPPLQLDTGQLVKIAKRGGVTAMEAVHASRNALTGAPLNLTPDQVVAIASNNGGKQALETVQRLLPVLCQDHGLTPEQVVAIASNIGGKQALETVQRLLPVLCQAHGLTPDQVVAIASNNGGKQALETVQRLLPVLCQAHGLTPAQVVAIASHDGGKQALETVQRLLPVLCQDHGLTPDQVVAIASHDGGKQALETVQRLLPVLCQDHGLTPEQVVAIASHDGGKQALETVQRLLPVLCQAHGLTPDQVVAIASNIGGKQALETVQRLLPVLCQAHGLTPAQVVAIASNNGGKQALETVQRLLPVLCQDHGLTPDQVVAIASNIGGKQALETVQRLLPVLCQDHGLTPEQVVAIASNIGGKQALETVQRLLPVLCQAHGLTPDQVVAIASNNGGKQALETVQRLLPVLCQAHGLTPAQVVAIASNNGGKQALETVQRLLPVLCQDHGLTPDQVVAIASNNGGKQALETVQRLLPVLCQDHGLTPEQVVAIASNNGGKQALETVQRLLPVLCQAHGLTPDQVVAIASNIGGKQALETVQRLLPVLCQAHGLTPAQVVAIASHDGGKQALETVQRLLPVLCQDHGLTPEQVVAIASNIGGRPALESIVAQLSRPDPALAALTNDHLVALACLGGRPAMDAVKKGLPHAPELIRSSRADPKKKRKVGGGGTGGGGSAEYVRALFDFNGNDEEDLPFKKGDILRIRDKPEEQWWNAEDSEGKRGMILVPYVEKYSGDYKDHDGDYKDHDIDYKDDDDKSGMTDAEYVRIHEKLDIYTFKKQFFNNKKSVSHRCYVLFELKRRGERRACFWGYAVNKPQSGTERGIHAEIFSIRKVEEYLRDNPGQFTINWYSSWSPCADCAEKILEWYNQELRGNGHTLKIWACKLYYEKNARNQIGLWNLRDNGVGLNVMVSEHYQCCRKIFIQSSHNQLNENRWLEKTLKRAEKWRSELSIMIQVKILHTTKSPAVGSGGSGGSGGSTNLSDIIEKETGKQLVIQESILMLPEEVEEVIGNKPESDILVHTAYDESTDENVMLLTSDAPEYKPWALVIQDSNGENKIKMLSGGSGGSGGSTNLSDIIEKETGKQLVIQESILMLPEEVEEVIGNKPESDILVHTAYDESTDENVMLLTSDAPEYKPWALVIQDSNGENKIKMLSGGSKRTADGSEFEPKKKRKV

SEQ ID NO: 155 - DNA, 4044 bp, Artificial Sequence
  WT(AS14-1)-12-AID
atggactataaggaccacgacggagactacaaggatcatgatattgattacaaagacgatgacgataagatggccccaaagaagaagcggaaggtcggtatccacggagtcccagcagccgtagatttgagaactttgggatattcacagcagcagcaggaaaagatcaagcccaaagtgaggtcgacagtcgcgcagcatcacgaagcgctggtgggtcatgggtttacacatgcccacatcgtagccttgtcgcagcaccctgcagcccttggcacggtcgccgtcaagtaccaggacatgattgcggcgttgccggaagccacacatgaggcgatcgtcggtgtggggaaacagtggagcggagcccgagcgcttgaggccctgttgacggtcgcgggagagctgagagggcctccccttcagctggacacgggccagttgctgaagatcgcgaagcggggaggagtcacggcggtcgaggcggtacacgcgtggcgcaatgcgctcacgggagcacccctcaacctgaccccagaccaggttgtggccatcgccagcaacataggtggcaagcaggccctcgaaaccgtccagagactgttaccggttctctgccaggaccacggcctgaccccagaacaagttgtcgcgattgcaagcaacaacggaggcaaacaagccttagaaacagtccagagattgttgccggtgctgtgccaagcccacggcctgaccccggaccaggtggttgcaatcgcgtcacacgatgggggaaagcaggccctagaaaccgttcagcgactcctgcccgtcctgtgccaggcccacggcctgacccccgcccaggttgtcgctattgctagtaacggcggaggcaaacaggcgctggaaacagttcagcgcctcttgccggtcttgtgtcaggaccacggcctgacccccgaccaggttgtcgctattgctagtaacggcggaggcaaacaggcgctggaaacagttcagcgcctcttgccggtcttgtgtcaggaccacggcctgaccccagaacaagttgtcgcgattgcaagcaacaacggaggcaaacaagccttagaaacagtccagagattgttgccggtgctgtgccaagcccacggcctgaccccagaccaagttgtcgcgattgcaagcaacaacggaggcaaacaagccttagaaacagtccagagattgttgcctgtgctgtgccaagcccacggcctgacccccgcccaggttgtcgctattgctagtaacggcggaggcaaacaggcgctggaaacagttcagcgcctcttgccggtcttgtgtcaggaccacggcctgaccccggaccaggtggttgcaatcgcgtcacacgatgggggaaagcaggccctagaaaccgttcagcgactcctgcccgtcctgtgccaggaccacggcctgaccccggaacaggtggttgcaatcgcgtcacacgatgggggaaagcaggccctagaaaccgttcagcgactcctgcccgtcctgtgccaggcccacggcctgaccccagaccaggttgtggccatcgccagcaacataggtggcaagcaggccctcgaaaccgtccagagactgttaccggttctctgccaggcccacggcctgaccccagcccaggttgtggccatcgccagcaacataggtggcaagcaggccctcgaaaccgtccagagactgttaccggttctctgccaggaccacggcctgaccccggaccaggtggttgcaatcgcgtcacacgatgggggaaagcaggccctagaaaccgttcagcgactcctgcccgtcctgtgccaggaccacggcctgaccccggaacaggtggttgcaatcgcgtcacacgatgggggaaagcaggccctagaaaccgttcagcgactcctgcccgtcctgtgccaggcccacggcctgacccccgaccaggttgtcgctattgctagtaacggcggaggcaaacaggcgctggaaacagttcagcgcctcttgccggtcttgtgtcaggcccacggcctgaccccagcccaagttgtcgcgattgcaagcaacaacggaggcaaacaagccttagaaacagtccagagattgttgccggtgctgtgccaagaccacggcctgacccctgagcaggtagtggctattgcatccaacggagggggcagacccgcactggagtcaatcgtggcccagctctcgaggccggaccccgcgctggccgcactcactaatgatcatcttgtagcgctggcctgcctcggcggacgacccgccttggatgcggtgaagaaggggctcccgcacgcgcctgcattgattaagcggaccaacagaaggatccccgagaggacatcacatcgagtggcagatcacgcgcaagtggtccgcgtgctcggattcttccagtgtcactcccaccccgcacaagcgttcgatgacgccatgactcaatttggtatgtcgagacacggactgctgcagctctttcgtagagtcggtgtcacagaactggaggcccgctcgggcacactgcctcccgcctcccagcggtgggacaggattctccaagcgagcggtatgaaacgcgcgaagccttcacctacgtcaactcagacacctgaccaggcgagccttcatgcgttcgcagactcgctggagagggatttggacgcgccctcgcccatgcatgaaggggaccaaactcgcgcgtcagccagcgctagccccaagaagaagagaaaggtggaggccagcatgaccgacgccgagtatgtgcggatccacgagaagctggatatctacaccttcaagaagcagttctttaacaataagaagtccgtgtctcacagatgctatgtgctgttcgagctgaagcggagaggagagaggcgcgcatgtttttggggctacgccgtgaataagccacagagcggaaccgagaggggaatccacgccgagatcttctccatcaggaaagtggaggagtatctgcgcgacaaccctggccagtttacaatcaattggtacagctcctggagcccatgcgccgattgtgccgagaagatcctggagtggtataaccaggagctgagaggcaatggccacaccctgaagatctgggcctgcaagctgtactatgagaagaacgcccggaatcagatcggcctgtggaacctgagagacaatggcgtgggcctgaacgtgatggtgtctgagcactaccagtgctgtaggaagatcttcatccagtctagccacaatcagctgaacgagaatcgctggctggagaagacactgaagagggccgagaagtggcgcagcgagctgtccatcatgatccaggtgaagatcctgcacaccacaaagagcccagcagtgggatccggaggatctggaggaagcggaggatccaccaacctgtctgacatcatcgagaaggagacaggcaagcagctggtcatccaggagagcatcctgatgctgcccgaggaggtggaggaagtgatcggcaacaagcctgagtccgatatcctggtgcacaccgcctacgacgagtccacagatgagaatgtgatgctgctgacctctgacgccccagagtataagccctgggccctggtcatccaggatagcaacggcgagaataagatcaagatgctgtccggcggaagcggaggatccggaggctctaccaatctgtccgatattattgaaaaagagacaggcaagcaactggtcatccaggagtctatcctgatgctgccagaagaagtcgaagaagtgatcggaaacaagcccgaaagcgacatcctggtccatactgcctacgacgagagtaccgacgaaaatgtgatgttactgacctccgacgcccctgagtataagccatgggctctggtcatccaggactccaatggagaaaataagatcaagatgttaagcggcggctccaagagaacagccgacggctccgagttcgagcccaagaagaagcggaaagtg

SEQ ID NO: 156 - protein, 1348 aa, Artificial Sequence
  WT(AS14-1)-12-AID
MDYKDHDGDYKDHDIDYKDDDDKMAPKKKRKVGIHGVPAAVDLRTLGYSQQQQEKIKPKVRSTVAQHHEALVGHGFTHAHIVALSQHPAALGTVAVKYQDMIAALPEATHEAIVGVGKQWSGARALEALLTVAGELRGPPLQLDTGQLLKIAKRGGVTAVEAVHAWRNALTGAPLNLTPDQVVAIASNIGGKQALETVQRLLPVLCQDHGLTPEQVVAIASNNGGKQALETVQRLLPVLCQAHGLTPDQVVAIASHDGGKQALETVQRLLPVLCQAHGLTPAQVVAIASNGGGKQALETVQRLLPVLCQDHGLTPDQVVAIASNGGGKQALETVQRLLPVLCQDHGLTPEQVVAIASNNGGKQALETVQRLLPVLCQAHGLTPDQVVAIASNNGGKQALETVQRLLPVLCQAHGLTPAQVVAIASNGGGKQALETVQRLLPVLCQDHGLTPDQVVAIASHDGGKQALETVQRLLPVLCQDHGLTPEQVVAIASHDGGKQALETVQRLLPVLCQAHGLTPDQVVAIASNIGGKQALETVQRLLPVLCQAHGLTPAQVVAIASNIGGKQALETVQRLLPVLCQDHGLTPDQVVAIASHDGGKQALETVQRLLPVLCQDHGLTPEQVVAIASHDGGKQALETVQRLLPVLCQAHGLTPDQVVAIASNGGGKQALETVQRLLPVLCQAHGLTPAQVVAIASNNGGKQALETVQRLLPVLCQDHGLTPEQVVAIASNGGGRPALESIVAQLSRPDPALAALTNDHLVALACLGGRPALDAVKKGLPHAPALIKRTNRRIPERTSHRVADHAQVVRVLGFFQCHSHPAQAFDDAMTQFGMSRHGLLQLFRRVGVTELEARSGTLPPASQRWDRILQASGMKRAKPSPTSTQTPDQASLHAFADSLERDLDAPSPMHEGDQTRASASASPKKKRKVEASMTDAEYVRIHEKLDIYTFKKQFFNNKKSVSHRCYVLFELKRRGERRACFWGYAVNKPQSGTERGIHAEIFSIRKVEEYLRDNPGQFTINWYSSWSPCADCAEKILEWYNQELRGNGHTLKIWACKLYYEKNARNQIGLWNLRDNGVGLNVMVSEHYQCCRKIFIQSSHNQLNENRWLEKTLKRAEKWRSELSIMIQVKILHTTKSPAVGSGGSGGSGGSTNLSDIIEKETGKQLVIQESILMLPEEVEEVIGNKPESDILVHTAYDESTDENVMLLTSDAPEYKPWALVIQDSNGENKIKMLSGGSGGSGGSTNLSDIIEKETGKQLVIQESILMLPEEVEEVIGNKPESDILVHTAYDESTDENVMLLTSDAPEYKPWALVIQDSNGENKIKMLSGGSKRTADGSEFEPKKKRKV

SEQ ID NO: 157 - DNA, 3966 bp, Artificial Sequence
  47(AS14-1)-104-AID
atggcttcctcccctccaaagaaaaagagaaaggttgcggccgctgactacaaggatgacgacgataaaagttggaaggacgcaagtggttggtctagaatgcatgcggccccgcgacggcgtgctgcgcaaccctccgacgcttcgccggccgcgcaggtggatctacgcacgctcggctacagtcagcagcagcaagagaagatcaaaccgaaggtgcgttcgacagtggcgcagcaccacgaggcactggtgggccatgggtttacacacgcgcacatcgttgcgctcagccaacacccggcagcgttagggaccgtcgctgtcacgtatcagcacataatcacggcgttgccagaggcgacacacgaagacatcgttggcgtcggcaaacagtggtccggcgcacgcgccctggaggccttgctcacggatgcgggggagttgagaggtccgccgttacagttggacacaggccaacttgtgaagattgcaaaacgtggcggcgtgaccgcaatggaggcagtgcatgcatcgcgcaatgcgctcacgggagcacccctcaacctgaccccagaccaggttgtggccatcgccagcaacataggtggcaagcaggccctcgaaaccgtccagagactgttaccggttctctgccaggaccacggcctgaccccagaacaagttgtcgcgattgcaagcaacaacggaggcaaacaagccttagaaacagtccagagattgttgccggtgctgtgccaagcccacggcctgaccccggaccaggtggttgcaatcgcgtcacacgatgggggaaagcaggccctagaaaccgttcagcgactcctgcccgtcctgtgccaggcccacggcctgacccccgcccaggttgtcgctattgctagtaacggcggaggcaaacaggcgctggaaacagttcagcgcctcttgccggtcttgtgtcaggaccacggcctgacccccgaccaggttgtcgctattgctagtaacggcggaggcaaacaggcgctggaaacagttcagcgcctcttgccggtcttgtgtcaggaccacggcctgaccccagaacaagttgtcgcgattgcaagcaacaacggaggcaaacaagccttagaaacagtccagagattgttgccggtgctgtgccaagcccacggcctgaccccagaccaagttgtcgcgattgcaagcaacaacggaggcaaacaagccttagaaacagtccagagattgttgcctgtgctgtgccaagcccacggcctgacccccgcccaggttgtcgctattgctagtaacggcggaggcaaacaggcgctggaaacagttcagcgcctcttgccggtcttgtgtcaggaccacggcctgaccccggaccaggtggttgcaatcgcgtcacacgatgggggaaagcaggccctagaaaccgttcagcgactcctgcccgtcctgtgccaggaccacggcctgaccccggaacaggtggttgcaatcgcgtcacacgatgggggaaagcaggccctagaaaccgttcagcgactcctgcccgtcctgtgccaggcccacggcctgaccccagaccaggttgtggccatcgccagcaacataggtggcaagcaggccctcgaaaccgtccagagactgttaccggttctctgccaggcccacggcctgaccccagcccaggttgtggccatcgccagcaacataggtggcaagcaggccctcgaaaccgtccagagactgttaccggttctctgccaggaccacggcctgaccccggaccaggtggttgcaatcgcgtcacacgatgggggaaagcaggccctagaaaccgttcagcgactcctgcccgtcctgtgccaggaccacggcctgaccccggaacaggtggttgcaatcgcgtcacacgatgggggaaagcaggccctagaaaccgttcagcgactcctgcccgtcctgtgccaggcccacggcctgacccccgaccaggttgtcgctattgctagtaacggcggaggcaaacaggcgctggaaacagttcagcgcctcttgccggtcttgtgtcaggcccacggcctgaccccagcccaagttgtcgcgattgcaagcaacaacggaggcaaacaagccttagaaacagtccagagattgttgccggtgctgtgccaagaccacggcctgacccctgagcaggtagtggctattgcatccaacggagggggcagacccgcactggagtcaatcgtggcccagctttcgaggccggaccccgcgctggccgcactcactaatgatcatcttgtagcgctggcctgcctcggcggacgtcctgccatggatgcagtgaaaaagggattgccgcacgcgccggaattgatcagatccagcagggcagatcccaagaagaagcggaaagtaggaggaggaggaaccggaggaggaggctccgccgagtacgtgagggccctgttcgacttcaacggcaatgacgaggaggatctgccattcaagaagggcgacatcctgcggatcagagataagcccgaggagcagtggtggaacgccgaggactctgagggcaagcgcggcatgatcctggtgccttacgtggagaagtatagcggcgattacaaggaccacgatggcgactataaggatcacgacatcgattacaaggacgatgacgataagtctggcatgaccgacgccgagtatgtgcggatccacgagaagctggatatctacaccttcaagaagcagttctttaacaataagaagtccgtgtctcacagatgctatgtgctgttcgagctgaagcggagaggagagaggcgcgcatgtttttggggctacgccgtgaataagccacagagcggaaccgagaggggaatccacgccgagatcttctccatcaggaaagtggaggagtatctgcgcgacaaccctggccagtttacaatcaattggtacagctcctggagcccatgcgccgattgtgccgagaagatcctggagtggtataaccaggagctgagaggcaatggccacaccctgaagatctgggcctgcaagctgtactatgagaagaacgcccggaatcagatcggcctgtggaacctgagagacaatggcgtgggcctgaacgtgatggtgtctgagcactaccagtgctgtaggaagatcttcatccagtctagccacaatcagctgaacgagaatcgctggctggagaagacactgaagagggccgagaagtggcgcagcgagctgtccatcatgatccaggtgaagatcctgcacaccacaaagagcccagcagtgggatccggaggatctggaggaagcggaggatccaccaacctgtctgacatcatcgagaaggagacaggcaagcagctggtcatccaggagagcatcctgatgctgcccgaggaggtggaggaagtgatcggcaacaagcctgagtccgatatcctggtgcacaccgcctacgacgagtccacagatgagaatgtgatgctgctgacctctgacgccccagagtataagccctgggccctggtcatccaggatagcaacggcgagaataagatcaagatgctgtccggcggaagcggaggatccggaggctctaccaatctgtccgatattattgaaaaagagacaggcaagcaactggtcatccaggagtctatcctgatgctgccagaagaagtcgaagaagtgatcggaaacaagcccgaaagcgacatcctggtccatactgcctacgacgagagtaccgacgaaaatgtgatgttactgacctccgacgcccctgagtataagccatgggctctggtcatccaggactccaatggagaaaataagatcaagatgttaagcggcggctccaagagaacagccgacggctccgagttcgagcccaagaagaagcggaaagtg

SEQ ID NO: 158 - protein, 1322 aa, Artificial Sequence
  47(AS14-1)-104-AID
MASSPPKKKRKVAAADYKDDDDKSWKDASGWSRMHAAPRRRAAQPSDASPAAQVDLRTLGYSQQQQEKIKPKVRSTVAQHHEALVGHGFTHAHIVALSQHPAALGTVAVTYQHIITALPEATHEDIVGVGKQWSGARALEALLTDAGELRGPPLQLDTGQLVKIAKRGGVTAMEAVHASRNALTGAPLNLTPDQVVAIASNIGGKQALETVQRLLPVLCQDHGLTPEQVVAIASNNGGKQALETVQRLLPVLCQAHGLTPDQVVAIASHDGGKQALETVQRLLPVLCQAHGLTPAQVVAIASNGGGKQALETVQRLLPVLCQDHGLTPDQVVAIASNGGGKQALETVQRLLPVLCQDHGLTPEQVVAIASNNGGKQALETVQRLLPVLCQAHGLTPDQVVAIASNNGGKQALETVQRLLPVLCQAHGLTPAQVVAIASNGGGKQALETVQRLLPVLCQDHGLTPDQVVAIASHDGGKQALETVQRLLPVLCQDHGLTPEQVVAIASHDGGKQALETVQRLLPVLCQAHGLTPDQVVAIASNIGGKQALETVQRLLPVLCQAHGLTPAQVVAIASNIGGKQALETVQRLLPVLCQDHGLTPDQVVAIASHDGGKQALETVQRLLPVLCQDHGLTPEQVVAIASHDGGKQALETVQRLLPVLCQAHGLTPDQVVAIASNGGGKQALETVQRLLPVLCQAHGLTPAQVVAIASNNGGKQALETVQRLLPVLCQDHGLTPEQVVAIASNGGGRPALESIVAQLSRPDPALAALTNDHLVALACLGGRPAMDAVKKGLPHAPELIRSSRADPKKKRKVGGGGTGGGGSAEYVRALFDFNGNDEEDLPFKKGDILRIRDKPEEQWWNAEDSEGKRGMILVPYVEKYSGDYKDHDGDYKDHDIDYKDDDDKSGMTDAEYVRIHEKLDIYTFKKQFFNNKKSVSHRCYVLFELKRRGERRACFWGYAVNKPQSGTERGIHAEIFSIRKVEEYLRDNPGQFTINWYSSWSPCADCAEKILEWYNQELRGNGHTLKIWACKLYYEKNARNQIGLWNLRDNGVGLNVMVSEHYQCCRKIFIQSSHNQLNENRWLEKTLKRAEKWRSELSIMIQVKILHTTKSPAVGSGGSGGSGGSTNLSDIIEKETGKQLVIQESILMLPEEVEEVIGNKPESDILVHTAYDESTDENVMLLTSDAPEYKPWALVIQDSNGENKIKMLSGGSGGSGGSTNLSDIIEKETGKQLVIQESILMLPEEVEEVIGNKPESDILVHTAYDESTDENVMLLTSDAPEYKPWALVIQDSNGENKIKMLSGGSKRTADGSEFEPKKKRKV

SEQ ID NO: 159 - DNA, 3792 bp, Artificial Sequence
  47(AS14-2)-12-AID
atggcttcctcccctccaaagaaaaagagaaaggttgcggccgctgactacaaggatgacgacgataaaagttggaaggacgcaagtggttggtctagaatgcatgcggccccgcgacggcgtgctgcgcaaccctccgacgcttcgccggccgcgcaggtggatctacgcacgctcggctacagtcagcagcagcaagagaagatcaaaccgaaggtgcgttcgacagtggcgcagcaccacgaggcactggtgggccatgggtttacacacgcgcacatcgttgcgctcagccaacacccggcagcgttagggaccgtcgctgtcacgtatcagcacataatcacggcgttgccagaggcgacacacgaagacatcgttggcgtcggcaaacagtggtccggcgcacgcgccctggaggccttgctcacggatgcgggggagttgagaggtccgccgttacagttggacacaggccaacttgtgaagattgcaaaacgtggcggcgtgaccgcaatggaggcagtgcatgcatcgcgcaatgcgctcacgggagcacccctcaacctgaccccagaccaagttgtcgcgattgcaagcaacaacggaggcaaacaagccttagaaacagtccagagattgttgccggtgctgtgccaagaccacggcctgaccccagaacaagttgtcgcgattgcaagcaacaacggaggcaaacaagccttagaaacagtccagagattgttgccggtgctgtgccaagcccacggcctgacccccgaccaggttgtcgctattgctagtaacggcggaggcaaacaggcgctggaaacagttcagcgcctcttgccggtcttgtgtcaggcccacggcctgaccccggcccaggtggttgcaatcgcgtcacacgatgggggaaagcaggccctagaaaccgttcagcgactcctgcccgtcctgtgccaggaccacggcctgaccccggaccaggtggttgcaatcgcgtcacacgatgggggaaagcaggccctagaaaccgttcagcgactcctgcccgtcctgtgccaggaccacggcctgaccccagaacaggttgtggccatcgccagcaacataggtggcaagcaggccctcgaaaccgtccagagactgttaccggttctctgccaggcccacggcctgaccccagaccaggttgtggccatcgccagcaacataggtggcaagcaggccctcgaaaccgtccagagactgttaccggttctctgccaggcccacggcctgaccccggcccaggtggttgcaatcgcgtcacacgatgggggaaagcaggccctagaaaccgttcagcgactcctgcccgtcctgtgccaggaccacggcctgaccccggaccaggtggttgcaatcgcgtcacacgatgggggaaagcaggccctagaaaccgttcagcgactcctgcccgtcctgtgccaggaccacggcctgacccccgaacaggttgtcgctattgctagtaacggcggaggcaaacaggcgctggaaacagttcagcgcctcttgccggtcttgtgtcaggcccacggcctgaccccagaccaagttgtcgcgattgcaagcaacaacggaggcaaacaagccttagaaacagtccagagattgttgcctgtgctgtgccaagcccacggcctgacccccgcccaggttgtcgctattgctagtaacggcggaggcaaacaggcgctggaaacagttcagcgcctcttgccggtcttgtgtcaggaccacggcctgacccccgaccaggttgtcgctattgctagtaacggcggaggcaaacaggcgctggaaacagttcagcgcctcttgccggtcttgtgtcaggaccacggcctgaccccagaacaggttgtggccatcgccagcaacataggtggcaagcaggccctcgaaaccgtccagagactgttaccggttctctgccaggcccacggcctgaccccagaccaagttgtcgcgattgcaagcaacaacggaggcaaacaagccttagaaacagtccagagattgttgcctgtgctgtgccaagcccacggcctgaccccagcccaggttgtggccatcgccagcaacataggtggcaagcaggccctcgaaaccgtccagagactgttaccggttctctgccaggaccacggcctgaccccagaccaagttgtcgcgattgcaagcaacaacggaggcaaacaagccttagaaacagtccagagattgttgccggtgctgtgccaagaccacggcctgacccctgagcaggtagtggctattgcatcccacgacgggggcagacccgcactggagtcaatcgtggcccagctttcgaggccggaccccgcgctggccgcactcactaatgatcatcttgtagcgctggcctgcctcggcggacgtcctgccatggatgcagtgaaaaagggattgccgcacgcgccggaattgatcagatccgctagccccaagaagaagagaaaggtggaggccagcatgaccgacgccgagtatgtgcggatccacgagaagctggatatctacaccttcaagaagcagttctttaacaataagaagtccgtgtctcacagatgctatgtgctgttcgagctgaagcggagaggagagaggcgcgcatgtttttggggctacgccgtgaataagccacagagcggaaccgagaggggaatccacgccgagatcttctccatcaggaaagtggaggagtatctgcgcgacaaccctggccagtttacaatcaattggtacagctcctggagcccatgcgccgattgtgccgagaagatcctggagtggtataaccaggagctgagaggcaatggccacaccctgaagatctgggcctgcaagctgtactatgagaagaacgcccggaatcagatcggcctgtggaacctgagagacaatggcgtgggcctgaacgtgatggtgtctgagcactaccagtgctgtaggaagatcttcatccagtctagccacaatcagctgaacgagaatcgctggctggagaagacactgaagagggccgagaagtggcgcagcgagctgtccatcatgatccaggtgaagatcctgcacaccacaaagagcccagcagtgggatccggaggatctggaggaagcggaggatccaccaacctgtctgacatcatcgagaaggagacaggcaagcagctggtcatccaggagagcatcctgatgctgcccgaggaggtggaggaagtgatcggcaacaagcctgagtccgatatcctggtgcacaccgcctacgacgagtccacagatgagaatgtgatgctgctgacctctgacgccccagagtataagccctgggccctggtcatccaggatagcaacggcgagaataagatcaagatgctgtccggcggaagcggaggatccggaggctctaccaatctgtccgatattattgaaaaagagacaggcaagcaactggtcatccaggagtctatcctgatgctgccagaagaagtcgaagaagtgatcggaaacaagcccgaaagcgacatcctggtccatactgcctacgacgagagtaccgacgaaaatgtgatgttactgacctccgacgcccctgagtataagccatgggctctggtcatccaggactccaatggagaaaataagatcaagatgttaagcggcggctccaagagaacagccgacggctccgagttcgagcccaagaagaagcggaaagtg

SEQ ID NO: 160 - protein, 1264 aa, Artificial Sequence
  47(AS14-2)-12-AID
MASSPPKKKRKVAAADYKDDDDKSWKDASGWSRMHAAPRRRAAQPSDASPAAQVDLRTLGYSQQQQEKIKPKVRSTVAQHHEALVGHGFTHAHIVALSQHPAALGTVAVTYQHIITALPEATHEDIVGVGKQWSGARALEALLTDAGELRGPPLQLDTGQLVKIAKRGGVTAMEAVHASRNALTGAPLNLTPDQVVAIASNNGGKQALETVQRLLPVLCQDHGLTPEQVVAIASNNGGKQALETVQRLLPVLCQAHGLTPDQVVAIASNGGGKQALETVQRLLPVLCQAHGLTPAQVVAIASHDGGKQALETVQRLLPVLCQDHGLTPDQVVAIASHDGGKQALETVQRLLPVLCQDHGLTPEQVVAIASNIGGKQALETVQRLLPVLCQAHGLTPDQVVAIASNIGGKQALETVQRLLPVLCQAHGLTPAQVVAIASHDGGKQALETVQRLLPVLCQDHGLTPDQVVAIASHDGGKQALETVQRLLPVLCQDHGLTPEQVVAIASNGGGKQALETVQRLLPVLCQAHGLTPDQVVAIASNNGGKQALETVQRLLPVLCQAHGLTPAQVVAIASNGGGKQALETVQRLLPVLCQDHGLTPDQVVAIASNGGGKQALETVQRLLPVLCQDHGLTPEQVVAIASNIGGKQALETVQRLLPVLCQAHGLTPDQVVAIASNNGGKQALETVQRLLPVLCQAHGLTPAQVVAIASNIGGKQALETVQRLLPVLCQDHGLTPDQVVAIASNNGGKQALETVQRLLPVLCQDHGLTPEQVVAIASHDGGRPALESIVAQLSRPDPALAALTNDHLVALACLGGRPAMDAVKKGLPHAPELIRSASPKKKRKVEASMTDAEYVRIHEKLDIYTFKKQFFNNKKSVSHRCYVLFELKRRGERRACFWGYAVNKPQSGTERGIHAEIFSIRKVEEYLRDNPGQFTINWYSSWSPCADCAEKILEWYNQELRGNGHTLKIWACKLYYEKNARNQIGLWNLRDNGVGLNVMVSEHYQCCRKIFIQSSHNQLNENRWLEKTLKRAEKWRSELSIMIQVKILHTTKSPAVGSGGSGGSGGSTNLSDIIEKETGKQLVIQESILMLPEEVEEVIGNKPESDILVHTAYDESTDENVMLLTSDAPEYKPWALVIQDSNGENKIKMLSGGSGGSGGSTNLSDIIEKETGKQLVIQESILMLPEEVEEVIGNKPESDILVHTAYDESTDENVMLLTSDAPEYKPWALVIQDSNGENKIKMLSGGSKRTADGSEFEPKKKRKV

SEQ ID NO: 161 - DNA, 3942 bp, Artificial Sequence
  WT(S2)-12-AID
atggactataaggaccacgacggagactacaaggatcatgatattgattacaaagacgatgacgataagatggccccaaagaagaagcggaaggtcggtatccacggagtcccagcagccgtagatttgagaactttgggatattcacagcagcagcaggaaaagatcaagcccaaagtgaggtcgacagtcgcgcagcatcacgaagcgctggtgggtcatgggtttacacatgcccacatcgtagccttgtcgcagcaccctgcagcccttggcacggtcgccgtcaagtaccaggacatgattgcggcgttgccggaagccacacatgaggcgatcgtcggtgtggggaaacagtggagcggagcccgagcgcttgaggccctgttgacggtcgcgggagagctgagagggcctccccttcagctggacacgggccagttgctgaagatcgcgaagcggggaggagtcacggcggtcgaggcggtacacgcgtggcgcaatgcgctcacgggagcacccctcaacctgaccccagaccaagttgtcgcgattgcaagcaacaacggaggcaaacaagccttagaaacagtccagagattgttgccggtgctgtgccaagaccacggcctgaccccggaacaggtggttgcaatcgcgtcacacgatgggggaaagcaggccctagaaaccgttcagcgactcctgcccgtcctgtgccaggcccacggcctgaccccggaccaggtggttgcaatcgcgtcacacgatgggggaaagcaggccctagaaaccgttcagcgactcctgcccgtcctgtgccaggcccacggcctgaccccagcccaggttgtggccatcgccagcaacataggtggcaagcaggccctcgaaaccgtccagagactgttaccggttctctgccaggaccacggcctgaccccggaccaggtggttgcaatcgcgtcacacgatgggggaaagcaggccctagaaaccgttcagcgactcctgcccgtcctgtgccaggaccacggcctgaccccagaacaggttgtggccatcgccagcaacataggtggcaagcaggccctcgaaaccgtccagagactgttaccggttctctgccaggcccacggcctgaccccggaccaggtggttgcaatcgcgtcacacgatgggggaaagcaggccctagaaaccgttcagcgactcctgcccgtcctgtgccaggcccacggcctgacccccgcccaggttgtcgctattgctagtaacggcggaggcaaacaggcgctggaaacagttcagcgcctcttgccggtcttgtgtcaggaccacggcctgaccccagaccaagttgtcgcgattgcaagcaacaacggaggcaaacaagccttagaaacagtccagagattgttgccggtgctgtgccaagaccacggcctgaccccagaacaggttgtggccatcgccagcaacataggtggcaagcaggccctcgaaaccgtccagagactgttaccggttctctgccaggcccacggcctgaccccagaccaagttgtcgcgattgcaagcaacaacggaggcaaacaagccttagaaacagtccagagattgttgcctgtgctgtgccaagcccacggcctgacccccgcccaggttgtcgctattgctagtaacggcggaggcaaacaggcgctggaaacagttcagcgcctcttgccggtcttgtgtcaggaccacggcctgaccccagaccaagttgtcgcgattgcaagcaacaacggaggcaaacaagccttagaaacagtccagagattgttgccggtgctgtgccaagaccacggcctgaccccagaacaggttgtggccatcgccagcaacataggtggcaagcaggccctcgaaaccgtccagagactgttaccggttctctgccaggcccacggcctgaccccagaccaagttgtcgcgattgcaagcaacaacggaggcaaacaagccttagaaacagtccagagattgttgcctgtgctgtgccaagcccacggcctgacccctgagcaggtagtggctattgcatcccacgacgggggcagacccgcactggagtcaatcgtggcccagctctcgaggccggaccccgcgctggccgcactcactaatgatcatcttgtagcgctggcctgcctcggcggacgacccgccttggatgcggtgaagaaggggctcccgcacgcgcctgcattgattaagcggaccaacagaaggatccccgagaggacatcacatcgagtggcagatcacgcgcaagtggtccgcgtgctcggattcttccagtgtcactcccaccccgcacaagcgttcgatgacgccatgactcaatttggtatgtcgagacacggactgctgcagctctttcgtagagtcggtgtcacagaactggaggcccgctcgggcacactgcctcccgcctcccagcggtgggacaggattctccaagcgagcggtatgaaacgcgcgaagccttcacctacgtcaactcagacacctgaccaggcgagccttcatgcgttcgcagactcgctggagagggatttggacgcgccctcgcccatgcatgaaggggaccaaactcgcgcgtcagccagcgctagccccaagaagaagagaaaggtggaggccagcatgaccgacgccgagtatgtgcggatccacgagaagctggatatctacaccttcaagaagcagttctttaacaataagaagtccgtgtctcacagatgctatgtgctgttcgagctgaagcggagaggagagaggcgcgcatgtttttggggctacgccgtgaataagccacagagcggaaccgagaggggaatccacgccgagatcttctccatcaggaaagtggaggagtatctgcgcgacaaccctggccagtttacaatcaattggtacagctcctggagcccatgcgccgattgtgccgagaagatcctggagtggtataaccaggagctgagaggcaatggccacaccctgaagatctgggcctgcaagctgtactatgagaagaacgcccggaatcagatcggcctgtggaacctgagagacaatggcgtgggcctgaacgtgatggtgtctgagcactaccagtgctgtaggaagatcttcatccagtctagccacaatcagctgaacgagaatcgctggctggagaagacactgaagagggccgagaagtggcgcagcgagctgtccatcatgatccaggtgaagatcctgcacaccacaaagagcccagcagtgggatccggaggatctggaggaagcggaggatccaccaacctgtctgacatcatcgagaaggagacaggcaagcagctggtcatccaggagagcatcctgatgctgcccgaggaggtggaggaagtgatcggcaacaagcctgagtccgatatcctggtgcacaccgcctacgacgagtccacagatgagaatgtgatgctgctgacctctgacgccccagagtataagccctgggccctggtcatccaggatagcaacggcgagaataagatcaagatgctgtccggcggaagcggaggatccggaggctctaccaatctgtccgatattattgaaaaagagacaggcaagcaactggtcatccaggagtctatcctgatgctgccagaagaagtcgaagaagtgatcggaaacaagcccgaaagcgacatcctggtccatactgcctacgacgagagtaccgacgaaaatgtgatgttactgacctccgacgcccctgagtataagccatgggctctggtcatccaggactccaatggagaaaataagatcaagatgttaagcggcggctccaagagaacagccgacggctccgagttcgagcccaagaagaagcggaaagtg

SEQ ID NO: 162 - protein, 1314 aa, Artificial Sequence
  WT(S2)-12-AID
MDYKDHDGDYKDHDIDYKDDDDKMAPKKKRKVGIHGVPAAVDLRTLGYSQQQQEKIKPKVRSTVAQHHEALVGHGFTHAHIVALSQHPAALGTVAVKYQDMIAALPEATHEAIVGVGKQWSGARALEALLTVAGELRGPPLQLDTGQLLKIAKRGGVTAVEAVHAWRNALTGAPLNLTPDQVVAIASNNGGKQALETVQRLLPVLCQDHGLTPEQVVAIASHDGGKQALETVQRLLPVLCQAHGLTPDQVVAIASHDGGKQALETVQRLLPVLCQAHGLTPAQVVAIASNIGGKQALETVQRLLPVLCQDHGLTPDQVVAIASHDGGKQALETVQRLLPVLCQDHGLTPEQVVAIASNIGGKQALETVQRLLPVLCQAHGLTPDQVVAIASHDGGKQALETVQRLLPVLCQAHGLTPAQVVAIASNGGGKQALETVQRLLPVLCQDHGLTPDQVVAIASNNGGKQALETVQRLLPVLCQDHGLTPEQVVAIASNIGGKQALETVQRLLPVLCQAHGLTPDQVVAIASNNGGKQALETVQRLLPVLCQAHGLTPAQVVAIASNGGGKQALETVQRLLPVLCQDHGLTPDQVVAIASNNGGKQALETVQRLLPVLCQDHGLTPEQVVAIASNIGGKQALETVQRLLPVLCQAHGLTPDQVVAIASNNGGKQALETVQRLLPVLCQAHGLTPEQVVAIASHDGGRPALESIVAQLSRPDPALAALTNDHLVALACLGGRPALDAVKKGLPHAPALIKRTNRRIPERTSHRVADHAQVVRVLGFFQCHSHPAQAFDDAMTQFGMSRHGLLQLFRRVGVTELEARSGTLPPASQRWDRILQASGMKRAKPSPTSTQTPDQASLHAFADSLERDLDAPSPMHEGDQTRASASASPKKKRKVEASMTDAEYVRIHEKLDIYTFKKQFFNNKKSVSHRCYVLFELKRRGERRACFWGYAVNKPQSGTERGIHAEIFSIRKVEEYLRDNPGQFTINWYSSWSPCADCAEKILEWYNQELRGNGHTLKIWACKLYYEKNARNQIGLWNLRDNGVGLNVMVSEHYQCCRKIFIQSSHNQLNENRWLEKTLKRAEKWRSELSIMIQVKILHTTKSPAVGSGGSGGSGGSTNLSDIIEKETGKQLVIQESILMLPEEVEEVIGNKPESDILVHTAYDESTDENVMLLTSDAPEYKPWALVIQDSNGENKIKMLSGGSGGSGGSTNLSDIIEKETGKQLVIQESILMLPEEVEEVIGNKPESDILVHTAYDESTDENVMLLTSDAPEYKPWALVIQDSNGENKIKMLSGGSKRTADGSEFEPKKKRKV

SEQ ID NO: 163 - DNA, 3864 bp, Artificial Sequence
  47(S2)-104-AID
atggcttcctcccctccaaagaaaaagagaaaggttgcggccgctgactacaaggatgacgacgataaaagttggaaggacgcaagtggttggtctagaatgcatgcggccccgcgacggcgtgctgcgcaaccctccgacgcttcgccggccgcgcaggtggatctacgcacgctcggctacagtcagcagcagcaagagaagatcaaaccgaaggtgcgttcgacagtggcgcagcaccacgaggcactggtgggccatgggtttacacacgcgcacatcgttgcgctcagccaacacccggcagcgttagggaccgtcgctgtcacgtatcagcacataatcacggcgttgccagaggcgacacacgaagacatcgttggcgtcggcaaacagtggtccggcgcacgcgccctggaggccttgctcacggatgcgggggagttgagaggtccgccgttacagttggacacaggccaacttgtgaagattgcaaaacgtggcggcgtgaccgcaatggaggcagtgcatgcatcgcgcaatgcgctcacgggagcacccctcaacctgaccccagaccaagttgtcgcgattgcaagcaacaacggaggcaaacaagccttagaaacagtccagagattgttgccggtgctgtgccaagaccacggcctgaccccggaacaggtggttgcaatcgcgtcacacgatgggggaaagcaggccctagaaaccgttcagcgactcctgcccgtcctgtgccaggcccacggcctgaccccggaccaggtggttgcaatcgcgtcacacgatgggggaaagcaggccctagaaaccgttcagcgactcctgcccgtcctgtgccaggcccacggcctgaccccagcccaggttgtggccatcgccagcaacataggtggcaagcaggccctcgaaaccgtccagagactgttaccggttctctgccaggaccacggcctgaccccggaccaggtggttgcaatcgcgtcacacgatgggggaaagcaggccctagaaaccgttcagcgactcctgcccgtcctgtgccaggaccacggcctgaccccagaacaggttgtggccatcgccagcaacataggtggcaagcaggccctcgaaaccgtccagagactgttaccggttctctgccaggcccacggcctgaccccggaccaggtggttgcaatcgcgtcacacgatgggggaaagcaggccctagaaaccgttcagcgactcctgcccgtcctgtgccaggcccacggcctgacccccgcccaggttgtcgctattgctagtaacggcggaggcaaacaggcgctggaaacagttcagcgcctcttgccggtcttgtgtcaggaccacggcctgaccccagaccaagttgtcgcgattgcaagcaacaacggaggcaaacaagccttagaaacagtccagagattgttgccggtgctgtgccaagaccacggcctgaccccagaacaggttgtggccatcgccagcaacataggtggcaagcaggccctcgaaaccgtccagagactgttaccggttctctgccaggcccacggcctgaccccagaccaagttgtcgcgattgcaagcaacaacggaggcaaacaagccttagaaacagtccagagattgttgcctgtgctgtgccaagcccacggcctgacccccgcccaggttgtcgctattgctagtaacggcggaggcaaacaggcgctggaaacagttcagcgcctcttgccggtcttgtgtcaggaccacggcctgaccccagaccaagttgtcgcgattgcaagcaacaacggaggcaaacaagccttagaaacagtccagagattgttgccggtgctgtgccaagaccacggcctgaccccagaacaggttgtggccatcgccagcaacataggtggcaagcaggccctcgaaaccgtccagagactgttaccggttctctgccaggcccacggcctgaccccagaccaagttgtcgcgattgcaagcaacaacggaggcaaacaagccttagaaacagtccagagattgttgcctgtgctgtgccaagcccacggcctgacccctgagcaggtagtggctattgcatcccacgacgggggcagacccgcactggagtcaatcgtggcccagctttcgaggccggaccccgcgctggccgcactcactaatgatcatcttgtagcgctggcctgcctcggcggacgtcctgccatggatgcagtgaaaaagggattgccgcacgcgccggaattgatcagatccagcagggcagatcccaagaagaagcggaaagtaggaggaggaggaaccggaggaggaggctccgccgagtacgtgagggccctgttcgacttcaacggcaatgacgaggaggatctgccattcaagaagggcgacatcctgcggatcagagataagcccgaggagcagtggtggaacgccgaggactctgagggcaagcgcggcatgatcctggtgccttacgtggagaagtatagcggcgattacaaggaccacgatggcgactataaggatcacgacatcgattacaaggacgatgacgataagtctggcatgaccgacgccgagtatgtgcggatccacgagaagctggatatctacaccttcaagaagcagttctttaacaataagaagtccgtgtctcacagatgctatgtgctgttcgagctgaagcggagaggagagaggcgcgcatgtttttggggctacgccgtgaataagccacagagcggaaccgagaggggaatccacgccgagatcttctccatcaggaaagtggaggagtatctgcgcgacaaccctggccagtttacaatcaattggtacagctcctggagcccatgcgccgattgtgccgagaagatcctggagtggtataaccaggagctgagaggcaatggccacaccctgaagatctgggcctgcaagctgtactatgagaagaacgcccggaatcagatcggcctgtggaacctgagagacaatggcgtgggcctgaacgtgatggtgtctgagcactaccagtgctgtaggaagatcttcatccagtctagccacaatcagctgaacgagaatcgctggctggagaagacactgaagagggccgagaagtggcgcagcgagctgtccatcatgatccaggtgaagatcctgcacaccacaaagagcccagcagtgggatccggaggatctggaggaagcggaggatccaccaacctgtctgacatcatcgagaaggagacaggcaagcagctggtcatccaggagagcatcctgatgctgcccgaggaggtggaggaagtgatcggcaacaagcctgagtccgatatcctggtgcacaccgcctacgacgagtccacagatgagaatgtgatgctgctgacctctgacgccccagagtataagccctgggccctggtcatccaggatagcaacggcgagaataagatcaagatgctgtccggcggaagcggaggatccggaggctctaccaatctgtccgatattattgaaaaagagacaggcaagcaactggtcatccaggagtctatcctgatgctgccagaagaagtcgaagaagtgatcggaaacaagcccgaaagcgacatcctggtccatactgcctacgacgagagtaccgacgaaaatgtgatgttactgacctccgacgcccctgagtataagccatgggctctggtcatccaggactccaatggagaaaataagatcaagatgttaagcggcggctccaagagaacagccgacggctccgagttcgagcccaagaagaagcggaaagtg

SEQ ID NO: 164 - protein, 1288 aa, Artificial Sequence
  47(S2)-104-AID
MASSPPKKKRKVAAADYKDDDDKSWKDASGWSRMHAAPRRRAAQPSDASPAAQVDLRTLGYSQQQQEKIKPKVRSTVAQHHEALVGHGFTHAHIVALSQHPAALGTVAVTYQHIITALPEATHEDIVGVGKQWSGARALEALLTDAGELRGPPLQLDTGQLVKIAKRGGVTAMEAVHASRNALTGAPLNLTPDQVVAIASNNGGKQALETVQRLLPVLCQDHGLTPEQVVAIASHDGGKQALETVQRLLPVLCQAHGLTPDQVVAIASHDGGKQALETVQRLLPVLCQAHGLTPAQVVAIASNIGGKQALETVQRLLPVLCQDHGLTPDQVVAIASHDGGKQALETVQRLLPVLCQDHGLTPEQVVAIASNIGGKQALETVQRLLPVLCQAHGLTPDQVVAIASHDGGKQALETVQRLLPVLCQAHGLTPAQVVAIASNGGGKQALETVQRLLPVLCQDHGLTPDQVVAIASNNGGKQALETVQRLLPVLCQDHGLTPEQVVAIASNIGGKQALETVQRLLPVLCQAHGLTPDQVVAIASNNGGKQALETVQRLLPVLCQAHGLTPAQVVAIASNGGGKQALETVQRLLPVLCQDHGLTPDQVVAIASNNGGKQALETVQRLLPVLCQDHGLTPEQVVAIASNIGGKQALETVQRLLPVLCQAHGLTPDQVVAIASNNGGKQALETVQRLLPVLCQAHGLTPEQVVAIASHDGGRPALESIVAQLSRPDPALAALTNDHLVALACLGGRPAMDAVKKGLPHAPELIRSSRADPKKKRKVGGGGTGGGGSAEYVRALFDFNGNDEEDLPFKKGDILRIRDKPEEQWWNAEDSEGKRGMILVPYVEKYSGDYKDHDGDYKDHDIDYKDDDDKSGMTDAEYVRIHEKLDIYTFKKQFFNNKKSVSHRCYVLFELKRRGERRACFWGYAVNKPQSGTERGIHAEIFSIRKVEEYLRDNPGQFTINWYSSWSPCADCAEKILEWYNQELRGNGHTLKIWACKLYYEKNARNQIGLWNLRDNGVGLNVMVSEHYQCCRKIFIQSSHNQLNENRWLEKTLKRAEKWRSELSIMIQVKILHTTKSPAVGSGGSGGSGGSTNLSDIIEKETGKQLVIQESILMLPEEVEEVIGNKPESDILVHTAYDESTDENVMLLTSDAPEYKPWALVIQDSNGENKIKMLSGGSGGSGGSTNLSDIIEKETGKQLVIQESILMLPEEVEEVIGNKPESDILVHTAYDESTDENVMLLTSDAPEYKPWALVIQDSNGENKIKMLSGGSKRTADGSEFEPKKKRKV

SEQ ID NO: 165 - DNA, 3864 bp, Artificial Sequence
  BE4-32-47(AS14-3)
atgaagcgcaccgccgacggctctgagttcgagagccccaagaagaagcggaaggtgagctccgagacaggaccagtggcagtggaccctacactgcggagaaggatcgagcctcacgagtttgaggtgttctttgatccaagagagctgaggaaggagacatgcctgctgtacgagatcaagtggggcacatctcacaagatctggcgccactctagcaagaacaccacaaagcacgtggaagtgaatttcatcgagaagtttaccagcgagcggcacttctgccctagcacctcctgttctatcacatggtttctgagctggtccccatgcggcgagtgtagcaaggccatcaccgagttcctgtcccagcacccaaacgtgaccctggtcatctacgtggccaggctgtatcaccacatggaccagcagaacaggcagggcctgcgggatctggtgaattccggcgtgaccatccagatcatgacagcccccgagtacgattactgttggagaaacttcgtgaactacccacctggcaaggaggcacactggcctaggtacccacccctgtggatgaagctgtatgcactggagctgcacgcaggaatcctgggcctgcctccatgcctgaatatcctgcgccggaagcagccccagctgaccttctttacaatcgccctgcagagctgtcactaccagcggctgccacctcacatcctgtgggcaaccggcctgaagtctggaggatcctctggaggaagctccggaagcgagacaccaggcacatctgagagcgccacaccagagtctagcggcggctcctctggaggatccatggcttcctcccctccaaagaaaaagagaaaggttgcggccgctgactacaaggatgacgacgataaaagttggaaggacgcaagtggttggtctagaatgcatgcggccccgcgacggcgtgctgcgcaaccctccgacgcttcgccggccgcgcaggtggatctacgcacgctcggctacagtcagcagcagcaagagaagatcaaaccgaaggtgcgttcgacagtggcgcagcaccacgaggcactggtgggccatgggtttacacacgcgcacatcgttgcgctcagccaacacccggcagcgttagggaccgtcgctgtcacgtatcagcacataatcacggcgttgccagaggcgacacacgaagacatcgttggcgtcggcaaacagtggtccggcgcacgcgccctggaggccttgctcacggatgcgggggagttgagaggtccgccgttacagttggacacaggccaacttgtgaagattgcaaaacgtggcggcgtgaccgcaatggaggcagtgcatgcatcgcgcaatgcgctcacgggagcacccctcaacctgaccccggaccaggtggttgcaatcgcgtcacacgatgggggaaagcaggccctagaaaccgttcagcgactcctgcccgtcctgtgccaggaccacggcctgacccccgaacaggttgtcgctattgctagtaacggcggaggcaaacaggcgctggaaacagttcagcgcctcttgccggtcttgtgtcaggcccacggcctgaccccagaccaggttgtggccatcgccagcaacataggtggcaagcaggccctcgaaaccgtccagagactgttaccggttctctgccaggcccacggcctgaccccagcccaggttgtggccatcgccagcaacataggtggcaagcaggccctcgaaaccgtccagagactgttaccggttctctgccaggaccacggcctgaccccggaccaggtggttgcaatcgcgtcacacgatgggggaaagcaggccctagaaaccgttcagcgactcctgcccgtcctgtgccaggaccacggcctgaccccagaacaggttgtggccatcgccagcaacataggtggcaagcaggccctcgaaaccgtccagagactgttaccggttctctgccaggcccacggcctgaccccagaccaagttgtcgcgattgcaagcaacaacggaggcaaacaagccttagaaacagtccagagattgttgcctgtgctgtgccaagcccacggcctgaccccagcccaagttgtcgcgattgcaagcaacaacggaggcaaacaagccttagaaacagtccagagattgttgccggtgctgtgccaagaccacggcctgacccccgaccaggttgtcgctattgctagtaacggcggaggcaaacaggcgctggaaacagttcagcgcctcttgccggtcttgtgtcaggaccacggcctgacccccgaacaggttgtcgctattgctagtaacggcggaggcaaacaggcgctggaaacagttcagcgcctcttgccggtcttgtgtcaggcccacggcctgaccccagaccaagttgtcgcgattgcaagcaacaacggaggcaaacaagccttagaaacagtccagagattgttgcctgtgctgtgccaagcccacggcctgaccccagcccaagttgtcgcgattgcaagcaacaacggaggcaaacaagccttagaaacagtccagagattgttgccggtgctgtgccaagaccacggcctgaccccagaccaggttgtggccatcgccagcaacataggtggcaagcaggccctcgaaaccgtccagagactgttaccggttctctgccaggaccacggcctgaccccggaacaggtggttgcaatcgcgtcacacgatgggggaaagcaggccctagaaaccgttcagcgactcctgcccgtcctgtgccaggcccacggcctgaccccggaccaggtggttgcaatcgcgtcacacgatgggggaaagcaggccctagaaaccgttcagcgactcctgcccgtcctgtgccaggcccacggcctgaccccagcccaggttgtggccatcgccagcaacataggtggcaagcaggccctcgaaaccgtccagagactgttaccggttctctgccaggaccacggcctgacccctgagcaggtagtggctattgcatccaacaacgggggcagacccgcactggagtcaatcgtggcccagctttcgaggccggaccccgcgctggccgcactcactaatgatcatcttgtagcgctggcctgcctcggcggacgtcctgccatggatgcagtgaaaaagggattgccgcacgcgccggaattgatcagatcctccggaggatctggaggaagcggaggatccaccaacctgtctgacatcatcgagaaggagacaggcaagcagctggtcatccaggagagcatcctgatgctgcccgaggaggtggaggaagtgatcggcaacaagcctgagtccgatatcctggtgcacaccgcctacgacgagtccacagatgagaatgtgatgctgctgacctctgacgccccagagtataagccctgggccctggtcatccaggatagcaacggcgagaataagatcaagatgctgtccggcggaagcggaggatccggaggctctaccaatctgtccgatattattgaaaaagagacaggcaagcaactggtcatccaggagtctatcctgatgctgccagaagaagtcgaagaagtgatcggaaacaagcccgaaagcgacatcctggtccatactgcctacgacgagagtaccgacgaaaatgtgatgttactgacctccgacgcccctgagtataagccatgggctctggtcatccaggactccaatggagaaaataagatcaagatgttaagcggcggctccaagagaacagccgacggctccgagttcgagcccaagaagaagcggaaagtg

SEQ ID NO: 166 - protein, 1288 aa, Artificial Sequence
  BE4-32-47(AS14-3)
MKRTADGSEFESPKKKRKVSSETGPVAVDPTLRRRIEPHEFEVFFDPRELRKETCLLYEIKWGTSHKIWRHSSKNTTKHVEVNFIEKFTSERHFCPSTSCSITWFLSWSPCGECSKAITEFLSQHPNVTLVIYVARLYHHMDQQNRQGLRDLVNSGVTIQIMTAPEYDYCWRNFVNYPPGKEAHWPRYPPLWMKLYALELHAGILGLPPCLNILRRKQPQLTFFTIALQSCHYQRLPPHILWATGLKSGGSSGGSSGSETPGTSESATPESSGGSSGGSMASSPPKKKRKVAAADYKDDDDKSWKDASGWSRMHAAPRRRAAQPSDASPAAQVDLRTLGYSQQQQEKIKPKVRSTVAQHHEALVGHGFTHAHIVALSQHPAALGTVAVTYQHIITALPEATHEDIVGVGKQWSGARALEALLTDAGELRGPPLQLDTGQLVKIAKRGGVTAMEAVHASRNALTGAPLNLTPDQVVAIASHDGGKQALETVQRLLPVLCQDHGLTPEQVVAIASNGGGKQALETVQRLLPVLCQAHGLTPDQVVAIASNIGGKQALETVQRLLPVLCQAHGLTPAQVVAIASNIGGKQALETVQRLLPVLCQDHGLTPDQVVAIASHDGGKQALETVQRLLPVLCQDHGLTPEQVVAIASNIGGKQALETVQRLLPVLCQAHGLTPDQVVAIASNNGGKQALETVQRLLPVLCQAHGLTPAQVVAIASNNGGKQALETVQRLLPVLCQDHGLTPDQVVAIASNGGGKQALETVQRLLPVLCQDHGLTPEQVVAIASNGGGKQALETVQRLLPVLCQAHGLTPDQVVAIASNNGGKQALETVQRLLPVLCQAHGLTPAQVVAIASNNGGKQALETVQRLLPVLCQDHGLTPDQVVAIASNIGGKQALETVQRLLPVLCQDHGLTPEQVVAIASHDGGKQALETVQRLLPVLCQAHGLTPDQVVAIASHDGGKQALETVQRLLPVLCQAHGLTPAQVVAIASNIGGKQALETVQRLLPVLCQDHGLTPEQVVAIASNNGGRPALESIVAQLSRPDPALAALTNDHLVALACLGGRPAMDAVKKGLPHAPELIRSSGGSGGSGGSTNLSDIIEKETGKQLVIQESILMLPEEVEEVIGNKPESDILVHTAYDESTDENVMLLTSDAPEYKPWALVIQDSNGENKIKMLSGGSGGSGGSTNLSDIIEKETGKQLVIQESILMLPEEVEEVIGNKPESDILVHTAYDESTDENVMLLTSDAPEYKPWALVIQDSNGENKIKMLSGGSKRTADGSEFEPKKKRKV

SEQ ID NO: 167 - DNA, 4182 bp, Artificial Sequence
  BE4-135-63(AS14-3)
atgaagcgcaccgccgacggctctgagttcgagagccccaagaagaagcggaaggtgagctccgagacaggaccagtggcagtggaccctacactgcggagaaggatcgagcctcacgagtttgaggtgttctttgatccaagagagctgaggaaggagacatgcctgctgtacgagatcaagtggggcacatctcacaagatctggcgccactctagcaagaacaccacaaagcacgtggaagtgaatttcatcgagaagtttaccagcgagcggcacttctgccctagcacctcctgttctatcacatggtttctgagctggtccccatgcggcgagtgtagcaaggccatcaccgagttcctgtcccagcacccaaacgtgaccctggtcatctacgtggccaggctgtatcaccacatggaccagcagaacaggcagggcctgcgggatctggtgaattccggcgtgaccatccagatcatgacagcccccgagtacgattactgttggagaaacttcgtgaactacccacctggcaaggaggcacactggcctaggtacccacccctgtggatgaagctgtatgcactggagctgcacgcaggaatcctgggcctgcctccatgcctgaatatcctgcgccggaagcagccccagctgaccttctttacaatcgccctgcagagctgtcactaccagcggctgccacctcacatcctgtgggcaaccggcctgaagtctggaggatcctctggaggaagctccggaagcgagacaccaggcacatctgagagcgccacaccagagtctagcggcggctcctctggaggatcctacacccgggtgggaagcggatccggatctggaagcatcaccaggaccacaaaccctcgcaatgtggtgccaaagatctacatgtccgccggctctatccctctgaccacacacatcacaaacagcatccagccaaccctgtggacaatcggatccatcaatggagtggcaccactggccaagtctatcaagctgggcatccctgtgaccggcagcgcctacacagaccagaccacagccatggtgcggaagaaggtgagcgtgttcatgggcagcggatctggaagcggatctagcatgaccgcggtcatggactataaggaccacgacggagactacaaggatcatgatattgattacaaagacgatgacgataagatggccccaaagaagaagcggaaggtcggtatccacggagtcccagcagccgtagatttgagaactttgggatattcacagcagcagcaggaaaagatcaagcccaaagtgaggtcgacagtcgcgcagcatcacgaagcgctggtgggtcatgggtttacacatgcccacatcgtagccttgtcgcagcaccctgcagcccttggcacggtcgccgtcaagtaccaggacatgattgcggcgttgccggaagccacacatgaggcgatcgtcggtgtggggaaacagtggagcggagcccgagcgcttgaggccctgttgacggtcgcgggagagctgagagggcctccccttcagctggacacgggccagttgctgaagatcgcgaagcggggaggagtcacggcggtcgaggcggtacacgcgtggcgcaatgcgctcacgggagcacccctcaacctgaccccggaccaggtggttgcaatcgcgtcacacgatgggggaaagcaggccctagaaaccgttcagcgactcctgcccgtcctgtgccaggaccacggcctgacccccgaacaggttgtcgctattgctagtaacggcggaggcaaacaggcgctggaaacagttcagcgcctcttgccggtcttgtgtcaggcccacggcctgaccccagaccaggttgtggccatcgccagcaacataggtggcaagcaggccctcgaaaccgtccagagactgttaccggttctctgccaggcccacggcctgaccccagcccaggttgtggccatcgccagcaacataggtggcaagcaggccctcgaaaccgtccagagactgttaccggttctctgccaggaccacggcctgaccccggaccaggtggttgcaatcgcgtcacacgatgggggaaagcaggccctagaaaccgttcagcgactcctgcccgtcctgtgccaggaccacggcctgaccccagaacaggttgtggccatcgccagcaacataggtggcaagcaggccctcgaaaccgtccagagactgttaccggttctctgccaggcccacggcctgaccccagaccaagttgtcgcgattgcaagcaacaacggaggcaaacaagccttagaaacagtccagagattgttgcctgtgctgtgccaagcccacggcctgaccccagcccaagttgtcgcgattgcaagcaacaacggaggcaaacaagccttagaaacagtccagagattgttgccggtgctgtgccaagaccacggcctgacccccgaccaggttgtcgctattgctagtaacggcggaggcaaacaggcgctggaaacagttcagcgcctcttgccggtcttgtgtcaggaccacggcctgacccccgaacaggttgtcgctattgctagtaacggcggaggcaaacaggcgctggaaacagttcagcgcctcttgccggtcttgtgtcaggcccacggcctgaccccagaccaagttgtcgcgattgcaagcaacaacggaggcaaacaagccttagaaacagtccagagattgttgcctgtgctgtgccaagcccacggcctgaccccagcccaagttgtcgcgattgcaagcaacaacggaggcaaacaagccttagaaacagtccagagattgttgccggtgctgtgccaagaccacggcctgaccccagaccaggttgtggccatcgccagcaacataggtggcaagcaggccctcgaaaccgtccagagactgttaccggttctctgccaggaccacggcctgaccccggaacaggtggttgcaatcgcgtcacacgatgggggaaagcaggccctagaaaccgttcagcgactcctgcccgtcctgtgccaggcccacggcctgaccccggaccaggtggttgcaatcgcgtcacacgatgggggaaagcaggccctagaaaccgttcagcgactcctgcccgtcctgtgccaggcccacggcctgaccccagcccaggttgtggccatcgccagcaacataggtggcaagcaggccctcgaaaccgtccagagactgttaccggttctctgccaggaccacggcctgacccctgagcaggtagtggctattgcatccaacaacgggggcagacccgcactggagtcaatcgtggcccagctttcgaggccggaccccgcgctggccgcactcactaatgatcatcttgtagcgctggcctgcctcggcggacgacccgccttggatgcggtgaagaaggggctcccgcacgcgcctgcattgattaagcggaccaacagaaggatccccgagaggacatcacatcgagtggcaggttcctccggaggatctggaggaagcggaggatccaccaacctgtctgacatcatcgagaaggagacaggcaagcagctggtcatccaggagagcatcctgatgctgcccgaggaggtggaggaagtgatcggcaacaagcctgagtccgatatcctggtgcacaccgcctacgacgagtccacagatgagaatgtgatgctgctgacctctgacgccccagagtataagccctgggccctggtcatccaggatagcaacggcgagaataagatcaagatgctgtccggcggaagcggaggatccggaggctctaccaatctgtccgatattattgaaaaagagacaggcaagcaactggtcatccaggagtctatcctgatgctgccagaagaagtcgaagaagtgatcggaaacaagcccgaaagcgacatcctggtccatactgcctacgacgagagtaccgacgaaaatgtgatgttactgacctccgacgcccctgagtataagccatgggctctggtcatccaggactccaatggagaaaataagatcaagatgttaagcggcggctccaagagaacagccgacggctccgagttcgagcccaagaagaagcggaaagtg

SEQ ID NO: 168 - protein, 1394 aa, Artificial Sequence
  BE4-135-63(AS14-3)
MKRTADGSEFESPKKKRKVSSETGPVAVDPTLRRRIEPHEFEVFFDPRELRKETCLLYEIKWGTSHKIWRHSSKNTTKHVEVNFIEKFTSERHFCPSTSCSITWFLSWSPCGECSKAITEFLSQHPNVTLVIYVARLYHHMDQQNRQGLRDLVNSGVTIQIMTAPEYDYCWRNFVNYPPGKEAHWPRYPPLWMKLYALELHAGILGLPPCLNILRRKQPQLTFFTIALQSCHYQRLPPHILWATGLKSGGSSGGSSGSETPGTSESATPESSGGSSGGSYTRVGSGSGSGSITRTTNPRNVVPKIYMSAGSIPLTTHITNSIQPTLWTIGSINGVAPLAKSIKLGIPVTGSAYTDQTTAMVRKKVSVFMGSGSGSGSSMTAVMDYKDHDGDYKDHDIDYKDDDDKMAPKKKRKVGIHGVPAAVDLRTLGYSQQQQEKIKPKVRSTVAQHHEALVGHGFTHAHIVALSQHPAALGTVAVKYQDMIAALPEATHEAIVGVGKQWSGARALEALLTVAGELRGPPLQLDTGQLLKIAKRGGVTAVEAVHAWRNALTGAPLNLTPDQVVAIASHDGGKQALETVQRLLPVLCQDHGLTPEQVVAIASNGGGKQALETVQRLLPVLCQAHGLTPDQVVAIASNIGGKQALETVQRLLPVLCQAHGLTPAQVVAIASNIGGKQALETVQRLLPVLCQDHGLTPDQVVAIASHDGGKQALETVQRLLPVLCQDHGLTPEQVVAIASNIGGKQALETVQRLLPVLCQAHGLTPDQVVAIASNNGGKQALETVQRLLPVLCQAHGLTPAQVVAIASNNGGKQALETVQRLLPVLCQDHGLTPDQVVAIASNGGGKQALETVQRLLPVLCQDHGLTPEQVVAIASNGGGKQALETVQRLLPVLCQAHGLTPDQVVAIASNNGGKQALETVQRLLPVLCQAHGLTPAQVVAIASNNGGKQALETVQRLLPVLCQDHGLTPDQVVAIASNIGGKQALETVQRLLPVLCQDHGLTPEQVVAIASHDGGKQALETVQRLLPVLCQAHGLTPDQVVAIASHDGGKQALETVQRLLPVLCQAHGLTPAQVVAIASNIGGKQALETVQRLLPVLCQDHGLTPEQVVAIASNNGGRPALESIVAQLSRPDPALAALTNDHLVALACLGGRPALDAVKKGLPHAPALIKRTNRRIPERTSHRVAGSSGGSGGSGGSTNLSDIIEKETGKQLVIQESILMLPEEVEEVIGNKPESDILVHTAYDESTDENVMLLTSDAPEYKPWALVIQDSNGENKIKMLSGGSGGSGGSTNLSDIIEKETGKQLVIQESILMLPEEVEEVIGNKPESDILVHTAYDESTDENVMLLTSDAPEYKPWALVIQDSNGENKIKMLSGGSKRTADGSEFEPKKKRKV

SEQ ID NO: 169 - DNA, 3864 bp, Artificial Sequence
  BE4-32-47(AS5)
atgaagcgcaccgccgacggctctgagttcgagagccccaagaagaagcggaaggtgagctccgagacaggaccagtggcagtggaccctacactgcggagaaggatcgagcctcacgagtttgaggtgttctttgatccaagagagctgaggaaggagacatgcctgctgtacgagatcaagtggggcacatctcacaagatctggcgccactctagcaagaacaccacaaagcacgtggaagtgaatttcatcgagaagtttaccagcgagcggcacttctgccctagcacctcctgttctatcacatggtttctgagctggtccccatgcggcgagtgtagcaaggccatcaccgagttcctgtcccagcacccaaacgtgaccctggtcatctacgtggccaggctgtatcaccacatggaccagcagaacaggcagggcctgcgggatctggtgaattccggcgtgaccatccagatcatgacagcccccgagtacgattactgttggagaaacttcgtgaactacccacctggcaaggaggcacactggcctaggtacccacccctgtggatgaagctgtatgcactggagctgcacgcaggaatcctgggcctgcctccatgcctgaatatcctgcgccggaagcagccccagctgaccttctttacaatcgccctgcagagctgtcactaccagcggctgccacctcacatcctgtgggcaaccggcctgaagtctggaggatcctctggaggaagctccggaagcgagacaccaggcacatctgagagcgccacaccagagtctagcggcggctcctctggaggatccatggcttcctcccctccaaagaaaaagagaaaggttgcggccgctgactacaaggatgacgacgataaaagttggaaggacgcaagtggttggtctagaatgcatgcggccccgcgacggcgtgctgcgcaaccctccgacgcttcgccggccgcgcaggtggatctacgcacgctcggctacagtcagcagcagcaagagaagatcaaaccgaaggtgcgttcgacagtggcgcagcaccacgaggcactggtgggccatgggtttacacacgcgcacatcgttgcgctcagccaacacccggcagcgttagggaccgtcgctgtcacgtatcagcacataatcacggcgttgccagaggcgacacacgaagacatcgttggcgtcggcaaacagtggtccggcgcacgcgccctggaggccttgctcacggatgcgggggagttgagaggtccgccgttacagttggacacaggccaacttgtgaagattgcaaaacgtggcggcgtgaccgcaatggaggcagtgcatgcatcgcgcaatgcgctcacgggagcacccctcaacctgaccccagaccaagttgtcgcgattgcaagcaacaacggaggcaaacaagccttagaaacagtccagagattgttgccggtgctgtgccaagaccacggcctgaccccggaacaggtggttgcaatcgcgtcacacgatgggggaaagcaggccctagaaaccgttcagcgactcctgcccgtcctgtgccaggcccacggcctgaccccagaccaggttgtggccatcgccagcaacataggtggcaagcaggccctcgaaaccgtccagagactgttaccggttctctgccaggcccacggcctgaccccagcccaagttgtcgcgattgcaagcaacaacggaggcaaacaagccttagaaacagtccagagattgttgccggtgctgtgccaagaccacggcctgacccccgaccaggttgtcgctattgctagtaacggcggaggcaaacaggcgctggaaacagttcagcgcctcttgccggtcttgtgtcaggaccacggcctgaccccagaacaggttgtggccatcgccagcaacataggtggcaagcaggccctcgaaaccgtccagagactgttaccggttctctgccaggcccacggcctgaccccagaccaagttgtcgcgattgcaagcaacaacggaggcaaacaagccttagaaacagtccagagattgttgcctgtgctgtgccaagcccacggcctgaccccggcccaggtggttgcaatcgcgtcacacgatgggggaaagcaggccctagaaaccgttcagcgactcctgcccgtcctgtgccaggaccacggcctgacccccgaccaggttgtcgctattgctagtaacggcggaggcaaacaggcgctggaaacagttcagcgcctcttgccggtcttgtgtcaggaccacggcctgaccccggaacaggtggttgcaatcgcgtcacacgatgggggaaagcaggccctagaaaccgttcagcgactcctgcccgtcctgtgccaggcccacggcctgacccccgaccaggttgtcgctattgctagtaacggcggaggcaaacaggcgctggaaacagttcagcgcctcttgccggtcttgtgtcaggcccacggcctgaccccagcccaggttgtggccatcgccagcaacataggtggcaagcaggccctcgaaaccgtccagagactgttaccggttctctgccaggaccacggcctgaccccagaccaggttgtggccatcgccagcaacataggtggcaagcaggccctcgaaaccgtccagagactgttaccggttctctgccaggaccacggcctgaccccggaacaggtggttgcaatcgcgtcacacgatgggggaaagcaggccctagaaaccgttcagcgactcctgcccgtcctgtgccaggcccacggcctgaccccagaccaggttgtggccatcgccagcaacataggtggcaagcaggccctcgaaaccgtccagagactgttaccggttctctgccaggcccacggcctgaccccagcccaagttgtcgcgattgcaagcaacaacggaggcaaacaagccttagaaacagtccagagattgttgccggtgctgtgccaagaccacggcctgacccctgagcaggtagtggctattgcatccaacaacgggggcagacccgcactggagtcaatcgtggcccagctttcgaggccggaccccgcgctggccgcactcactaatgatcatcttgtagcgctggcctgcctcggcggacgtcctgccatggatgcagtgaaaaagggattgccgcacgcgccggaattgatcagatcctccggaggatctggaggaagcggaggatccaccaacctgtctgacatcatcgagaaggagacaggcaagcagctggtcatccaggagagcatcctgatgctgcccgaggaggtggaggaagtgatcggcaacaagcctgagtccgatatcctggtgcacaccgcctacgacgagtccacagatgagaatgtgatgctgctgacctctgacgccccagagtataagccctgggccctggtcatccaggatagcaacggcgagaataagatcaagatgctgtccggcggaagcggaggatccggaggctctaccaatctgtccgatattattgaaaaagagacaggcaagcaactggtcatccaggagtctatcctgatgctgccagaagaagtcgaagaagtgatcggaaacaagcccgaaagcgacatcctggtccatactgcctacgacgagagtaccgacgaaaatgtgatgttactgacctccgacgcccctgagtataagccatgggctctggtcatccaggactccaatggagaaaataagatcaagatgttaagcggcggctccaagagaacagccgacggctccgagttcgagcccaagaagaagcggaaagtg

SEQ ID NO: 170 - protein, 1288 aa, Artificial Sequence
  BE4-32-47(AS5)
MKRTADGSEFESPKKKRKVSSETGPVAVDPTLRRRIEPHEFEVFFDPRELRKETCLLYEIKWGTSHKIWRHSSKNTTKHVEVNFIEKFTSERHFCPSTSCSITWFLSWSPCGECSKAITEFLSQHPNVTLVIYVARLYHHMDQQNRQGLRDLVNSGVTIQIMTAPEYDYCWRNFVNYPPGKEAHWPRYPPLWMKLYALELHAGILGLPPCLNILRRKQPQLTFFTIALQSCHYQRLPPHILWATGLKSGGSSGGSSGSETPGTSESATPESSGGSSGGSMASSPPKKKRKVAAADYKDDDDKSWKDASGWSRMHAAPRRRAAQPSDASPAAQVDLRTLGYSQQQQEKIKPKVRSTVAQHHEALVGHGFTHAHIVALSQHPAALGTVAVTYQHIITALPEATHEDIVGVGKQWSGARALEALLTDAGELRGPPLQLDTGQLVKIAKRGGVTAMEAVHASRNALTGAPLNLTPDQVVAIASNNGGKQALETVQRLLPVLCQDHGLTPEQVVAIASHDGGKQALETVQRLLPVLCQAHGLTPDQVVAIASNIGGKQALETVQRLLPVLCQAHGLTPAQVVAIASNNGGKQALETVQRLLPVLCQDHGLTPDQVVAIASNGGGKQALETVQRLLPVLCQDHGLTPEQVVAIASNIGGKQALETVQRLLPVLCQAHGLTPDQVVAIASNNGGKQALETVQRLLPVLCQAHGLTPAQVVAIASHDGGKQALETVQRLLPVLCQDHGLTPDQVVAIASNGGGKQALETVQRLLPVLCQDHGLTPEQVVAIASHDGGKQALETVQRLLPVLCQAHGLTPDQVVAIASNGGGKQALETVQRLLPVLCQAHGLTPAQVVAIASNIGGKQALETVQRLLPVLCQDHGLTPDQVVAIASNIGGKQALETVQRLLPVLCQDHGLTPEQVVAIASHDGGKQALETVQRLLPVLCQAHGLTPDQVVAIASNIGGKQALETVQRLLPVLCQAHGLTPAQVVAIASNNGGKQALETVQRLLPVLCQDHGLTPEQVVAIASNNGGRPALESIVAQLSRPDPALAALTNDHLVALACLGGRPAMDAVKKGLPHAPELIRSSGGSGGSGGSTNLSDIIEKETGKQLVIQESILMLPEEVEEVIGNKPESDILVHTAYDESTDENVMLLTSDAPEYKPWALVIQDSNGENKIKMLSGGSGGSGGSTNLSDIIEKETGKQLVIQESILMLPEEVEEVIGNKPESDILVHTAYDESTDENVMLLTSDAPEYKPWALVIQDSNGENKIKMLSGGSKRTADGSEFEPKKKRKV

SEQ ID NO: 171 - DNA, 4182 bp, Artificial Sequence
  BE4-135-63(AS5)
atgaagcgcaccgccgacggctctgagttcgagagccccaagaagaagcggaaggtgagctccgagacaggaccagtggcagtggaccctacactgcggagaaggatcgagcctcacgagtttgaggtgttctttgatccaagagagctgaggaaggagacatgcctgctgtacgagatcaagtggggcacatctcacaagatctggcgccactctagcaagaacaccacaaagcacgtggaagtgaatttcatcgagaagtttaccagcgagcggcacttctgccctagcacctcctgttctatcacatggtttctgagctggtccccatgcggcgagtgtagcaaggccatcaccgagttcctgtcccagcacccaaacgtgaccctggtcatctacgtggccaggctgtatcaccacatggaccagcagaacaggcagggcctgcgggatctggtgaattccggcgtgaccatccagatcatgacagcccccgagtacgattactgttggagaaacttcgtgaactacccacctggcaaggaggcacactggcctaggtacccacccctgtggatgaagctgtatgcactggagctgcacgcaggaatcctgggcctgcctccatgcctgaatatcctgcgccggaagcagccccagctgaccttctttacaatcgccctgcagagctgtcactaccagcggctgccacctcacatcctgtgggcaaccggcctgaagtctggaggatcctctggaggaagctccggaagcgagacaccaggcacatctgagagcgccacaccagagtctagcggcggctcctctggaggatcctacacccgggtgggaagcggatccggatctggaagcatcaccaggaccacaaaccctcgcaatgtggtgccaaagatctacatgtccgccggctctatccctctgaccacacacatcacaaacagcatccagccaaccctgtggacaatcggatccatcaatggagtggcaccactggccaagtctatcaagctgggcatccctgtgaccggcagcgcctacacagaccagaccacagccatggtgcggaagaaggtgagcgtgttcatgggcagcggatctggaagcggatctagcatgaccgcggtcatggactataaggaccacgacggagactacaaggatcatgatattgattacaaagacgatgacgataagatggccccaaagaagaagcggaaggtcggtatccacggagtcccagcagccgtagatttgagaactttgggatattcacagcagcagcaggaaaagatcaagcccaaagtgaggtcgacagtcgcgcagcatcacgaagcgctggtgggtcatgggtttacacatgcccacatcgtagccttgtcgcagcaccctgcagcccttggcacggtcgccgtcaagtaccaggacatgattgcggcgttgccggaagccacacatgaggcgatcgtcggtgtggggaaacagtggagcggagcccgagcgcttgaggccctgttgacggtcgcgggagagctgagagggcctccccttcagctggacacgggccagttgctgaagatcgcgaagcggggaggagtcacggcggtcgaggcggtacacgcgtggcgcaatgcgctcacgggagcacccctcaacctgaccccagaccaagttgtcgcgattgcaagcaacaacggaggcaaacaagccttagaaacagtccagagattgttgccggtgctgtgccaagaccacggcctgaccccggaacaggtggttgcaatcgcgtcacacgatgggggaaagcaggccctagaaaccgttcagcgactcctgcccgtcctgtgccaggcccacggcctgaccccagaccaggttgtggccatcgccagcaacataggtggcaagcaggccctcgaaaccgtccagagactgttaccggttctctgccaggcccacggcctgaccccagcccaagttgtcgcgattgcaagcaacaacggaggcaaacaagccttagaaacagtccagagattgttgccggtgctgtgccaagaccacggcctgacccccgaccaggttgtcgctattgctagtaacggcggaggcaaacaggcgctggaaacagttcagcgcctcttgccggtcttgtgtcaggaccacggcctgaccccagaacaggttgtggccatcgccagcaacataggtggcaagcaggccctcgaaaccgtccagagactgttaccggttctctgccaggcccacggcctgaccccagaccaagttgtcgcgattgcaagcaacaacggaggcaaacaagccttagaaacagtccagagattgttgcctgtgctgtgccaagcccacggcctgaccccggcccaggtggttgcaatcgcgtcacacgatgggggaaagcaggccctagaaaccgttcagcgactcctgcccgtcctgtgccaggaccacggcctgacccccgaccaggttgtcgctattgctagtaacggcggaggcaaacaggcgctggaaacagttcagcgcctcttgccggtcttgtgtcaggaccacggcctgaccccggaacaggtggttgcaatcgcgtcacacgatgggggaaagcaggccctagaaaccgttcagcgactcctgcccgtcctgtgccaggcccacggcctgacccccgaccaggttgtcgctattgctagtaacggcggaggcaaacaggcgctggaaacagttcagcgcctcttgccggtcttgtgtcaggcccacggcctgaccccagcccaggttgtggccatcgccagcaacataggtggcaagcaggccctcgaaaccgtccagagactgttaccggttctctgccaggaccacggcctgaccccagaccaggttgtggccatcgccagcaacataggtggcaagcaggccctcgaaaccgtccagagactgttaccggttctctgccaggaccacggcctgaccccggaacaggtggttgcaatcgcgtcacacgatgggggaaagcaggccctagaaaccgttcagcgactcctgcccgtcctgtgccaggcccacggcctgaccccagaccaggttgtggccatcgccagcaacataggtggcaagcaggccctcgaaaccgtccagagactgttaccggttctctgccaggcccacggcctgaccccagcccaagttgtcgcgattgcaagcaacaacggaggcaaacaagccttagaaacagtccagagattgttgccggtgctgtgccaagaccacggcctgacccctgagcaggtagtggctattgcatccaacaacgggggcagacccgcactggagtcaatcgtggcccagctttcgaggccggaccccgcgctggccgcactcactaatgatcatcttgtagcgctggcctgcctcggcggacgacccgccttggatgcggtgaagaaggggctcccgcacgcgcctgcattgattaagcggaccaacagaaggatccccgagaggacatcacatcgagtggcaggttcctccggaggatctggaggaagcggaggatccaccaacctgtctgacatcatcgagaaggagacaggcaagcagctggtcatccaggagagcatcctgatgctgcccgaggaggtggaggaagtgatcggcaacaagcctgagtccgatatcctggtgcacaccgcctacgacgagtccacagatgagaatgtgatgctgctgacctctgacgccccagagtataagccctgggccctggtcatccaggatagcaacggcgagaataagatcaagatgctgtccggcggaagcggaggatccggaggctctaccaatctgtccgatattattgaaaaagagacaggcaagcaactggtcatccaggagtctatcctgatgctgccagaagaagtcgaagaagtgatcggaaacaagcccgaaagcgacatcctggtccatactgcctacgacgagagtaccgacgaaaatgtgatgttactgacctccgacgcccctgagtataagccatgggctctggtcatccaggactccaatggagaaaataagatcaagatgttaagcggcggctccaagagaacagccgacggctccgagttcgagcccaagaagaagcggaaagtg

SEQ ID NO: 172 - protein, 1394 aa, Artificial Sequence
  BE4-135-63(AS5)
MKRTADGSEFESPKKKRKVSSETGPVAVDPTLRRRIEPHEFEVFFDPRELRKETCLLYEIKWGTSHKIWRHSSKNTTKHVEVNFIEKFTSERHFCPSTSCSITWFLSWSPCGECSKAITEFLSQHPNVTLVIYVARLYHHMDQQNRQGLRDLVNSGVTIQIMTAPEYDYCWRNFVNYPPGKEAHWPRYPPLWMKLYALELHAGILGLPPCLNILRRKQPQLTFFTIALQSCHYQRLPPHILWATGLKSGGSSGGSSGSETPGTSESATPESSGGSSGGSYTRVGSGSGSGSITRTTNPRNVVPKIYMSAGSIPLTTHITNSIQPTLWTIGSINGVAPLAKSIKLGIPVTGSAYTDQTTAMVRKKVSVFMGSGSGSGSSMTAVMDYKDHDGDYKDHDIDYKDDDDKMAPKKKRKVGIHGVPAAVDLRTLGYSQQQQEKIKPKVRSTVAQHHEALVGHGFTHAHIVALSQHPAALGTVAVKYQDMIAALPEATHEAIVGVGKQWSGARALEALLTVAGELRGPPLQLDTGQLLKIAKRGGVTAVEAVHAWRNALTGAPLNLTPDQVVAIASNNGGKQALETVQRLLPVLCQDHGLTPEQVVAIASHDGGKQALETVQRLLPVLCQAHGLTPDQVVAIASNIGGKQALETVQRLLPVLCQAHGLTPAQVVAIASNNGGKQALETVQRLLPVLCQDHGLTPDQVVAIASNGGGKQALETVQRLLPVLCQDHGLTPEQVVAIASNIGGKQALETVQRLLPVLCQAHGLTPDQVVAIASNNGGKQALETVQRLLPVLCQAHGLTPAQVVAIASHDGGKQALETVQRLLPVLCQDHGLTPDQVVAIASNGGGKQALETVQRLLPVLCQDHGLTPEQVVAIASHDGGKQALETVQRLLPVLCQAHGLTPDQVVAIASNGGGKQALETVQRLLPVLCQAHGLTPAQVVAIASNIGGKQALETVQRLLPVLCQDHGLTPDQVVAIASNIGGKQALETVQRLLPVLCQDHGLTPEQVVAIASHDGGKQALETVQRLLPVLCQAHGLTPDQVVAIASNIGGKQALETVQRLLPVLCQAHGLTPAQVVAIASNNGGKQALETVQRLLPVLCQDHGLTPEQVVAIASNNGGRPALESIVAQLSRPDPALAALTNDHLVALACLGGRPALDAVKKGLPHAPALIKRTNRRIPERTSHRVAGSSGGSGGSGGSTNLSDIIEKETGKQLVIQESILMLPEEVEEVIGNKPESDILVHTAYDESTDENVMLLTSDAPEYKPWALVIQDSNGENKIKMLSGGSGGSGGSTNLSDIIEKETGKQLVIQESILMLPEEVEEVIGNKPESDILVHTAYDESTDENVMLLTSDAPEYKPWALVIQDSNGENKIKMLSGGSKRTADGSEFEPKKKRKV

SEQ ID NO: 173 - DNA, 3864 bp, Artificial Sequence
  BE4-32-47(AS6)
atgaagcgcaccgccgacggctctgagttcgagagccccaagaagaagcggaaggtgagctccgagacaggaccagtggcagtggaccctacactgcggagaaggatcgagcctcacgagtttgaggtgttctttgatccaagagagctgaggaaggagacatgcctgctgtacgagatcaagtggggcacatctcacaagatctggcgccactctagcaagaacaccacaaagcacgtggaagtgaatttcatcgagaagtttaccagcgagcggcacttctgccctagcacctcctgttctatcacatggtttctgagctggtccccatgcggcgagtgtagcaaggccatcaccgagttcctgtcccagcacccaaacgtgaccctggtcatctacgtggccaggctgtatcaccacatggaccagcagaacaggcagggcctgcgggatctggtgaattccggcgtgaccatccagatcatgacagcccccgagtacgattactgttggagaaacttcgtgaactacccacctggcaaggaggcacactggcctaggtacccacccctgtggatgaagctgtatgcactggagctgcacgcaggaatcctgggcctgcctccatgcctgaatatcctgcgccggaagcagccccagctgaccttctttacaatcgccctgcagagctgtcactaccagcggctgccacctcacatcctgtgggcaaccggcctgaagtctggaggatcctctggaggaagctccggaagcgagacaccaggcacatctgagagcgccacaccagagtctagcggcggctcctctggaggatccatggcttcctcccctccaaagaaaaagagaaaggttgcggccgctgactacaaggatgacgacgataaaagttggaaggacgcaagtggttggtctagaatgcatgcggccccgcgacggcgtgctgcgcaaccctccgacgcttcgccggccgcgcaggtggatctacgcacgctcggctacagtcagcagcagcaagagaagatcaaaccgaaggtgcgttcgacagtggcgcagcaccacgaggcactggtgggccatgggtttacacacgcgcacatcgttgcgctcagccaacacccggcagcgttagggaccgtcgctgtcacgtatcagcacataatcacggcgttgccagaggcgacacacgaagacatcgttggcgtcggcaaacagtggtccggcgcacgcgccctggaggccttgctcacggatgcgggggagttgagaggtccgccgttacagttggacacaggccaacttgtgaagattgcaaaacgtggcggcgtgaccgcaatggaggcagtgcatgcatcgcgcaatgcgctcacgggagcacccctcaacctgaccccggaccaggtggttgcaatcgcgtcacacgatgggggaaagcaggccctagaaaccgttcagcgactcctgcccgtcctgtgccaggaccacggcctgacccccgaacaggttgtcgctattgctagtaacggcggaggcaaacaggcgctggaaacagttcagcgcctcttgccggtcttgtgtcaggcccacggcctgaccccagaccaagttgtcgcgattgcaagcaacaacggaggcaaacaagccttagaaacagtccagagattgttgcctgtgctgtgccaagcccacggcctgaccccggcccaggtggttgcaatcgcgtcacacgatgggggaaagcaggccctagaaaccgttcagcgactcctgcccgtcctgtgccaggaccacggcctgaccccggaccaggtggttgcaatcgcgtcacacgatgggggaaagcaggccctagaaaccgttcagcgactcctgcccgtcctgtgccaggaccacggcctgaccccagaacaagttgtcgcgattgcaagcaacaacggaggcaaacaagccttagaaacagtccagagattgttgccggtgctgtgccaagcccacggcctgacccccgaccaggttgtcgctattgctagtaacggcggaggcaaacaggcgctggaaacagttcagcgcctcttgccggtcttgtgtcaggcccacggcctgacccccgcccaggttgtcgctattgctagtaacggcggaggcaaacaggcgctggaaacagttcagcgcctcttgccggtcttgtgtcaggaccacggcctgaccccagaccaggttgtggccatcgccagcaacataggtggcaagcaggccctcgaaaccgtccagagactgttaccggttctctgccaggaccacggcctgaccccggaacaggtggttgcaatcgcgtcacacgatgggggaaagcaggccctagaaaccgttcagcgactcctgcccgtcctgtgccaggcccacggcctgacccccgaccaggttgtcgctattgctagtaacggcggaggcaaacaggcgctggaaacagttcagcgcctcttgccggtcttgtgtcaggcccacggcctgaccccagcccaagttgtcgcgattgcaagcaacaacggaggcaaacaagccttagaaacagtccagagattgttgccggtgctgtgccaagaccacggcctgaccccggaccaggtggttgcaatcgcgtcacacgatgggggaaagcaggccctagaaaccgttcagcgactcctgcccgtcctgtgccaggaccacggcctgaccccggaacaggtggttgcaatcgcgtcacacgatgggggaaagcaggccctagaaaccgttcagcgactcctgcccgtcctgtgccaggcccacggcctgaccccggaccaggtggttgcaatcgcgtcacacgatgggggaaagcaggccctagaaaccgttcagcgactcctgcccgtcctgtgccaggcccacggcctgacccccgcccaggttgtcgctattgctagtaacggcggaggcaaacaggcgctggaaacagttcagcgcctcttgccggtcttgtgtcaggaccacggcctgacccctgagcaggtagtggctattgcatccaacaacgggggcagacccgcactggagtcaatcgtggcccagctttcgaggccggaccccgcgctggccgcactcactaatgatcatcttgtagcgctggcctgcctcggcggacgtcctgccatggatgcagtgaaaaagggattgccgcacgcgccggaattgatcagatcctccggaggatctggaggaagcggaggatccaccaacctgtctgacatcatcgagaaggagacaggcaagcagctggtcatccaggagagcatcctgatgctgcccgaggaggtggaggaagtgatcggcaacaagcctgagtccgatatcctggtgcacaccgcctacgacgagtccacagatgagaatgtgatgctgctgacctctgacgccccagagtataagccctgggccctggtcatccaggatagcaacggcgagaataagatcaagatgctgtccggcggaagcggaggatccggaggctctaccaatctgtccgatattattgaaaaagagacaggcaagcaactggtcatccaggagtctatcctgatgctgccagaagaagtcgaagaagtgatcggaaacaagcccgaaagcgacatcctggtccatactgcctacgacgagagtaccgacgaaaatgtgatgttactgacctccgacgcccctgagtataagccatgggctctggtcatccaggactccaatggagaaaataagatcaagatgttaagcggcggctccaagagaacagccgacggctccgagttcgagcccaagaagaagcggaaagtg

SEQ ID NO: 174 - protein, 1288 aa, Artificial Sequence
  BE4-32-47(AS6)
MKRTADGSEFESPKKKRKVSSETGPVAVDPTLRRRIEPHEFEVFFDPRELRKETCLLYEIKWGTSHKIWRHSSKNTTKHVEVNFIEKFTSERHFCPSTSCSITWFLSWSPCGECSKAITEFLSQHPNVTLVIYVARLYHHMDQQNRQGLRDLVNSGVTIQIMTAPEYDYCWRNFVNYPPGKEAHWPRYPPLWMKLYALELHAGILGLPPCLNILRRKQPQLTFFTIALQSCHYQRLPPHILWATGLKSGGSSGGSSGSETPGTSESATPESSGGSSGGSMASSPPKKKRKVAAADYKDDDDKSWKDASGWSRMHAAPRRRAAQPSDASPAAQVDLRTLGYSQQQQEKIKPKVRSTVAQHHEALVGHGFTHAHIVALSQHPAALGTVAVTYQHIITALPEATHEDIVGVGKQWSGARALEALLTDAGELRGPPLQLDTGQLVKIAKRGGVTAMEAVHASRNALTGAPLNLTPDQVVAIASHDGGKQALETVQRLLPVLCQDHGLTPEQVVAIASNGGGKQALETVQRLLPVLCQAHGLTPDQVVAIASNNGGKQALETVQRLLPVLCQAHGLTPAQVVAIASHDGGKQALETVQRLLPVLCQDHGLTPDQVVAIASHDGGKQALETVQRLLPVLCQDHGLTPEQVVAIASNNGGKQALETVQRLLPVLCQAHGLTPDQVVAIASNGGGKQALETVQRLLPVLCQAHGLTPAQVVAIASNGGGKQALETVQRLLPVLCQDHGLTPDQVVAIASNIGGKQALETVQRLLPVLCQDHGLTPEQVVAIASHDGGKQALETVQRLLPVLCQAHGLTPDQVVAIASNGGGKQALETVQRLLPVLCQAHGLTPAQVVAIASNNGGKQALETVQRLLPVLCQDHGLTPDQVVAIASHDGGKQALETVQRLLPVLCQDHGLTPEQVVAIASHDGGKQALETVQRLLPVLCQAHGLTPDQVVAIASHDGGKQALETVQRLLPVLCQAHGLTPAQVVAIASNGGGKQALETVQRLLPVLCQDHGLTPEQVVAIASNNGGRPALESIVAQLSRPDPALAALTNDHLVALACLGGRPAMDAVKKGLPHAPELIRSSGGSGGSGGSTNLSDIIEKETGKQLVIQESILMLPEEVEEVIGNKPESDILVHTAYDESTDENVMLLTSDAPEYKPWALVIQDSNGENKIKMLSGGSGGSGGSTNLSDIIEKETGKQLVIQESILMLPEEVEEVIGNKPESDILVHTAYDESTDENVMLLTSDAPEYKPWALVIQDSNGENKIKMLSGGSKRTADGSEFEPKKKRKV

SEQ ID NO: 175 - DNA, 4182 bp, Artificial Sequence
  BE4-135-63(AS6)
atgaagcgcaccgccgacggctctgagttcgagagccccaagaagaagcggaaggtgagctccgagacaggaccagtggcagtggaccctacactgcggagaaggatcgagcctcacgagtttgaggtgttctttgatccaagagagctgaggaaggagacatgcctgctgtacgagatcaagtggggcacatctcacaagatctggcgccactctagcaagaacaccacaaagcacgtggaagtgaatttcatcgagaagtttaccagcgagcggcacttctgccctagcacctcctgttctatcacatggtttctgagctggtccccatgcggcgagtgtagcaaggccatcaccgagttcctgtcccagcacccaaacgtgaccctggtcatctacgtggccaggctgtatcaccacatggaccagcagaacaggcagggcctgcgggatctggtgaattccggcgtgaccatccagatcatgacagcccccgagtacgattactgttggagaaacttcgtgaactacccacctggcaaggaggcacactggcctaggtacccacccctgtggatgaagctgtatgcactggagctgcacgcaggaatcctgggcctgcctccatgcctgaatatcctgcgccggaagcagccccagctgaccttctttacaatcgccctgcagagctgtcactaccagcggctgccacctcacatcctgtgggcaaccggcctgaagtctggaggatcctctggaggaagctccggaagcgagacaccaggcacatctgagagcgccacaccagagtctagcggcggctcctctggaggatcctacacccgggtgggaagcggatccggatctggaagcatcaccaggaccacaaaccctcgcaatgtggtgccaaagatctacatgtccgccggctctatccctctgaccacacacatcacaaacagcatccagccaaccctgtggacaatcggatccatcaatggagtggcaccactggccaagtctatcaagctgggcatccctgtgaccggcagcgcctacacagaccagaccacagccatggtgcggaagaaggtgagcgtgttcatgggcagcggatctggaagcggatctagcatgaccgcggtcatggactataaggaccacgacggagactacaaggatcatgatattgattacaaagacgatgacgataagatggccccaaagaagaagcggaaggtcggtatccacggagtcccagcagccgtagatttgagaactttgggatattcacagcagcagcaggaaaagatcaagcccaaagtgaggtcgacagtcgcgcagcatcacgaagcgctggtgggtcatgggtttacacatgcccacatcgtagccttgtcgcagcaccctgcagcccttggcacggtcgccgtcaagtaccaggacatgattgcggcgttgccggaagccacacatgaggcgatcgtcggtgtggggaaacagtggagcggagcccgagcgcttgaggccctgttgacggtcgcgggagagctgagagggcctccccttcagctggacacgggccagttgctgaagatcgcgaagcggggaggagtcacggcggtcgaggcggtacacgcgtggcgcaatgcgctcacgggagcacccctcaacctgaccccggaccaggtggttgcaatcgcgtcacacgatgggggaaagcaggccctagaaaccgttcagcgactcctgcccgtcctgtgccaggaccacggcctgacccccgaacaggttgtcgctattgctagtaacggcggaggcaaacaggcgctggaaacagttcagcgcctcttgccggtcttgtgtcaggcccacggcctgaccccagaccaagttgtcgcgattgcaagcaacaacggaggcaaacaagccttagaaacagtccagagattgttgcctgtgctgtgccaagcccacggcctgaccccggcccaggtggttgcaatcgcgtcacacgatgggggaaagcaggccctagaaaccgttcagcgactcctgcccgtcctgtgccaggaccacggcctgaccccggaccaggtggttgcaatcgcgtcacacgatgggggaaagcaggccctagaaaccgttcagcgactcctgcccgtcctgtgccaggaccacggcctgaccccagaacaagttgtcgcgattgcaagcaacaacggaggcaaacaagccttagaaacagtccagagattgttgccggtgctgtgccaagcccacggcctgacccccgaccaggttgtcgctattgctagtaacggcggaggcaaacaggcgctggaaacagttcagcgcctcttgccggtcttgtgtcaggcccacggcctgacccccgcccaggttgtcgctattgctagtaacggcggaggcaaacaggcgctggaaacagttcagcgcctcttgccggtcttgtgtcaggaccacggcctgaccccagaccaggttgtggccatcgccagcaacataggtggcaagcaggccctcgaaaccgtccagagactgttaccggttctctgccaggaccacggcctgaccccggaacaggtggttgcaatcgcgtcacacgatgggggaaagcaggccctagaaaccgttcagcgactcctgcccgtcctgtgccaggcccacggcctgacccccgaccaggttgtcgctattgctagtaacggcggaggcaaacaggcgctggaaacagttcagcgcctcttgccggtcttgtgtcaggcccacggcctgaccccagcccaagttgtcgcgattgcaagcaacaacggaggcaaacaagccttagaaacagtccagagattgttgccggtgctgtgccaagaccacggcctgaccccggaccaggtggttgcaatcgcgtcacacgatgggggaaagcaggccctagaaaccgttcagcgactcctgcccgtcctgtgccaggaccacggcctgaccccggaacaggtggttgcaatcgcgtcacacgatgggggaaagcaggccctagaaaccgttcagcgactcctgcccgtcctgtgccaggcccacggcctgaccccggaccaggtggttgcaatcgcgtcacacgatgggggaaagcaggccctagaaaccgttcagcgactcctgcccgtcctgtgccaggcccacggcctgacccccgcccaggttgtcgctattgctagtaacggcggaggcaaacaggcgctggaaacagttcagcgcctcttgccggtcttgtgtcaggaccacggcctgacccctgagcaggtagtggctattgcatccaacaacgggggcagacccgcactggagtcaatcgtggcccagctttcgaggccggaccccgcgctggccgcactcactaatgatcatcttgtagcgctggcctgcctcggcggacgacccgccttggatgcggtgaagaaggggctcccgcacgcgcctgcattgattaagcggaccaacagaaggatccccgagaggacatcacatcgagtggcaggttcctccggaggatctggaggaagcggaggatccaccaacctgtctgacatcatcgagaaggagacaggcaagcagctggtcatccaggagagcatcctgatgctgcccgaggaggtggaggaagtgatcggcaacaagcctgagtccgatatcctggtgcacaccgcctacgacgagtccacagatgagaatgtgatgctgctgacctctgacgccccagagtataagccctgggccctggtcatccaggatagcaacggcgagaataagatcaagatgctgtccggcggaagcggaggatccggaggctctaccaatctgtccgatattattgaaaaagagacaggcaagcaactggtcatccaggagtctatcctgatgctgccagaagaagtcgaagaagtgatcggaaacaagcccgaaagcgacatcctggtccatactgcctacgacgagagtaccgacgaaaatgtgatgttactgacctccgacgcccctgagtataagccatgggctctggtcatccaggactccaatggagaaaataagatcaagatgttaagcggcggctccaagagaacagccgacggctccgagttcgagcccaagaagaagcggaaagtg

SEQ ID NO: 176 - protein, 1394 aa, Artificial Sequence
  BE4-135-63(AS6)
MKRTADGSEFESPKKKRKVSSETGPVAVDPTLRRRIEPHEFEVFFDPRELRKETCLLYEIKWGTSHKIWRHSSKNTTKHVEVNFIEKFTSERHFCPSTSCSITWFLSWSPCGECSKAITEFLSQHPNVTLVIYVARLYHHMDQQNRQGLRDLVNSGVTIQIMTAPEYDYCWRNFVNYPPGKEAHWPRYPPLWMKLYALELHAGILGLPPCLNILRRKQPQLTFFTIALQSCHYQRLPPHILWATGLKSGGSSGGSSGSETPGTSESATPESSGGSSGGSYTRVGSGSGSGSITRTTNPRNVVPKIYMSAGSIPLTTHITNSIQPTLWTIGSINGVAPLAKSIKLGIPVTGSAYTDQTTAMVRKKVSVFMGSGSGSGSSMTAVMDYKDHDGDYKDHDIDYKDDDDKMAPKKKRKVGIHGVPAAVDLRTLGYSQQQQEKIKPKVRSTVAQHHEALVGHGFTHAHIVALSQHPAALGTVAVKYQDMIAALPEATHEAIVGVGKQWSGARALEALLTVAGELRGPPLQLDTGQLLKIAKRGGVTAVEAVHAWRNALTGAPLNLTPDQVVAIASHDGGKQALETVQRLLPVLCQDHGLTPEQVVAIASNGGGKQALETVQRLLPVLCQAHGLTPDQVVAIASNNGGKQALETVQRLLPVLCQAHGLTPAQVVAIASHDGGKQALETVQRLLPVLCQDHGLTPDQVVAIASHDGGKQALETVQRLLPVLCQDHGLTPEQVVAIASNNGGKQALETVQRLLPVLCQAHGLTPDQVVAIASNGGGKQALETVQRLLPVLCQAHGLTPAQVVAIASNGGGKQALETVQRLLPVLCQDHGLTPDQVVAIASNIGGKQALETVQRLLPVLCQDHGLTPEQVVAIASHDGGKQALETVQRLLPVLCQAHGLTPDQVVAIASNGGGKQALETVQRLLPVLCQAHGLTPAQVVAIASNNGGKQALETVQRLLPVLCQDHGLTPDQVVAIASHDGGKQALETVQRLLPVLCQDHGLTPEQVVAIASHDGGKQALETVQRLLPVLCQAHGLTPDQVVAIASHDGGKQALETVQRLLPVLCQAHGLTPAQVVAIASNGGGKQALETVQRLLPVLCQDHGLTPEQVVAIASNNGGRPALESIVAQLSRPDPALAALTNDHLVALACLGGRPALDAVKKGLPHAPALIKRTNRRIPERTSHRVAGSSGGSGGSGGSTNLSDIIEKETGKQLVIQESILMLPEEVEEVIGNKPESDILVHTAYDESTDENVMLLTSDAPEYKPWALVIQDSNGENKIKMLSGGSGGSGGSTNLSDIIEKETGKQLVIQESILMLPEEVEEVIGNKPESDILVHTAYDESTDENVMLLTSDAPEYKPWALVIQDSNGENKIKMLSGGSKRTADGSEFEPKKKRKV

SEQ ID NO: 177 - DNA, 3864 bp, Artificial Sequence
  BE4-32-47(AS7)
atgaagcgcaccgccgacggctctgagttcgagagccccaagaagaagcggaaggtgagctccgagacaggaccagtggcagtggaccctacactgcggagaaggatcgagcctcacgagtttgaggtgttctttgatccaagagagctgaggaaggagacatgcctgctgtacgagatcaagtggggcacatctcacaagatctggcgccactctagcaagaacaccacaaagcacgtggaagtgaatttcatcgagaagtttaccagcgagcggcacttctgccctagcacctcctgttctatcacatggtttctgagctggtccccatgcggcgagtgtagcaaggccatcaccgagttcctgtcccagcacccaaacgtgaccctggtcatctacgtggccaggctgtatcaccacatggaccagcagaacaggcagggcctgcgggatctggtgaattccggcgtgaccatccagatcatgacagcccccgagtacgattactgttggagaaacttcgtgaactacccacctggcaaggaggcacactggcctaggtacccacccctgtggatgaagctgtatgcactggagctgcacgcaggaatcctgggcctgcctccatgcctgaatatcctgcgccggaagcagccccagctgaccttctttacaatcgccctgcagagctgtcactaccagcggctgccacctcacatcctgtgggcaaccggcctgaagtctggaggatcctctggaggaagctccggaagcgagacaccaggcacatctgagagcgccacaccagagtctagcggcggctcctctggaggatccatggcttcctcccctccaaagaaaaagagaaaggttgcggccgctgactacaaggatgacgacgataaaagttggaaggacgcaagtggttggtctagaatgcatgcggccccgcgacggcgtgctgcgcaaccctccgacgcttcgccggccgcgcaggtggatctacgcacgctcggctacagtcagcagcagcaagagaagatcaaaccgaaggtgcgttcgacagtggcgcagcaccacgaggcactggtgggccatgggtttacacacgcgcacatcgttgcgctcagccaacacccggcagcgttagggaccgtcgctgtcacgtatcagcacataatcacggcgttgccagaggcgacacacgaagacatcgttggcgtcggcaaacagtggtccggcgcacgcgccctggaggccttgctcacggatgcgggggagttgagaggtccgccgttacagttggacacaggccaacttgtgaagattgcaaaacgtggcggcgtgaccgcaatggaggcagtgcatgcatcgcgcaatgcgctcacgggagcacccctcaacctgacccccgaccaggttgtcgctattgctagtaacggcggaggcaaacaggcgctggaaacagttcagcgcctcttgccggtcttgtgtcaggaccacggcctgacccccgaacaggttgtcgctattgctagtaacggcggaggcaaacaggcgctggaaacagttcagcgcctcttgccggtcttgtgtcaggcccacggcctgaccccagaccaagttgtcgcgattgcaagcaacaacggaggcaaacaagccttagaaacagtccagagattgttgcctgtgctgtgccaagcccacggcctgaccccggcccaggtggttgcaatcgcgtcacacgatgggggaaagcaggccctagaaaccgttcagcgactcctgcccgtcctgtgccaggaccacggcctgaccccggaccaggtggttgcaatcgcgtcacacgatgggggaaagcaggccctagaaaccgttcagcgactcctgcccgtcctgtgccaggaccacggcctgaccccagaacaggttgtggccatcgccagcaacataggtggcaagcaggccctcgaaaccgtccagagactgttaccggttctctgccaggcccacggcctgaccccggaccaggtggttgcaatcgcgtcacacgatgggggaaagcaggccctagaaaccgttcagcgactcctgcccgtcctgtgccaggcccacggcctgaccccagcccaggttgtggccatcgccagcaacataggtggcaagcaggccctcgaaaccgtccagagactgttaccggttctctgccaggaccacggcctgaccccggaccaggtggttgcaatcgcgtcacacgatgggggaaagcaggccctagaaaccgttcagcgactcctgcccgtcctgtgccaggaccacggcctgacccccgaacaggttgtcgctattgctagtaacggcggaggcaaacaggcgctggaaacagttcagcgcctcttgccggtcttgtgtcaggcccacggcctgaccccagaccaagttgtcgcgattgcaagcaacaacggaggcaaacaagccttagaaacagtccagagattgttgcctgtgctgtgccaagcccacggcctgaccccagcccaggttgtggccatcgccagcaacataggtggcaagcaggccctcgaaaccgtccagagactgttaccggttctctgccaggaccacggcctgaccccagaccaagttgtcgcgattgcaagcaacaacggaggcaaacaagccttagaaacagtccagagattgttgccggtgctgtgccaagaccacggcctgacccccgaacaggttgtcgctattgctagtaacggcggaggcaaacaggcgctggaaacagttcagcgcctcttgccggtcttgtgtcaggcccacggcctgaccccagaccaagttgtcgcgattgcaagcaacaacggaggcaaacaagccttagaaacagtccagagattgttgcctgtgctgtgccaagcccacggcctgaccccagcccaggttgtggccatcgccagcaacataggtggcaagcaggccctcgaaaccgtccagagactgttaccggttctctgccaggaccacggcctgacccctgagcaggtagtggctattgcatccaacaacgggggcagacccgcactggagtcaatcgtggcccagctttcgaggccggaccccgcgctggccgcactcactaatgatcatcttgtagcgctggcctgcctcggcggacgtcctgccatggatgcagtgaaaaagggattgccgcacgcgccggaattgatcagatcctccggaggatctggaggaagcggaggatccaccaacctgtctgacatcatcgagaaggagacaggcaagcagctggtcatccaggagagcatcctgatgctgcccgaggaggtggaggaagtgatcggcaacaagcctgagtccgatatcctggtgcacaccgcctacgacgagtccacagatgagaatgtgatgctgctgacctctgacgccccagagtataagccctgggccctggtcatccaggatagcaacggcgagaataagatcaagatgctgtccggcggaagcggaggatccggaggctctaccaatctgtccgatattattgaaaaagagacaggcaagcaactggtcatccaggagtctatcctgatgctgccagaagaagtcgaagaagtgatcggaaacaagcccgaaagcgacatcctggtccatactgcctacgacgagagtaccgacgaaaatgtgatgttactgacctccgacgcccctgagtataagccatgggctctggtcatccaggactccaatggagaaaataagatcaagatgttaagcggcggctccaagagaacagccgacggctccgagttcgagcccaagaagaagcggaaagtg

SEQ ID NO: 178 - protein, 1288 aa, Artificial Sequence
  BE4-32-47(AS7)
MKRTADGSEFESPKKKRKVSSETGPVAVDPTLRRRIEPHEFEVFFDPRELRKETCLLYEIKWGTSHKIWRHSSKNTTKHVEVNFIEKFTSERHFCPSTSCSITWFLSWSPCGECSKAITEFLSQHPNVTLVIYVARLYHHMDQQNRQGLRDLVNSGVTIQIMTAPEYDYCWRNFVNYPPGKEAHWPRYPPLWMKLYALELHAGILGLPPCLNILRRKQPQLTFFTIALQSCHYQRLPPHILWATGLKSGGSSGGSSGSETPGTSESATPESSGGSSGGSMASSPPKKKRKVAAADYKDDDDKSWKDASGWSRMHAAPRRRAAQPSDASPAAQVDLRTLGYSQQQQEKIKPKVRSTVAQHHEALVGHGFTHAHIVALSQHPAALGTVAVTYQHIITALPEATHEDIVGVGKQWSGARALEALLTDAGELRGPPLQLDTGQLVKIAKRGGVTAMEAVHASRNALTGAPLNLTPDQVVAIASNGGGKQALETVQRLLPVLCQDHGLTPEQVVAIASNGGGKQALETVQRLLPVLCQAHGLTPDQVVAIASNNGGKQALETVQRLLPVLCQAHGLTPAQVVAIASHDGGKQALETVQRLLPVLCQDHGLTPDQVVAIASHDGGKQALETVQRLLPVLCQDHGLTPEQVVAIASNIGGKQALETVQRLLPVLCQAHGLTPDQVVAIASHDGGKQALETVQRLLPVLCQAHGLTPAQVVAIASNIGGKQALETVQRLLPVLCQDHGLTPDQVVAIASHDGGKQALETVQRLLPVLCQDHGLTPEQVVAIASNGGGKQALETVQRLLPVLCQAHGLTPDQVVAIASNNGGKQALETVQRLLPVLCQAHGLTPAQVVAIASNIGGKQALETVQRLLPVLCQDHGLTPDQVVAIASNNGGKQALETVQRLLPVLCQDHGLTPEQVVAIASNGGGKQALETVQRLLPVLCQAHGLTPDQVVAIASNNGGKQALETVQRLLPVLCQAHGLTPAQVVAIASNIGGKQALETVQRLLPVLCQDHGLTPEQVVAIASNNGGRPALESIVAQLSRPDPALAALTNDHLVALACLGGRPAMDAVKKGLPHAPELIRSSGGSGGSGGSTNLSDIIEKETGKQLVIQESILMLPEEVEEVIGNKPESDILVHTAYDESTDENVMLLTSDAPEYKPWALVIQDSNGENKIKMLSGGSGGSGGSTNLSDIIEKETGKQLVIQESILMLPEEVEEVIGNKPESDILVHTAYDESTDENVMLLTSDAPEYKPWALVIQDSNGENKIKMLSGGSKRTADGSEFEPKKKRKV

SEQ ID NO: 179 - DNA, 4182 bp, Artificial Sequence
  BE4-135-63(AS7)
atgaagcgcaccgccgacggctctgagttcgagagccccaagaagaagcggaaggtgagctccgagacaggaccagtggcagtggaccctacactgcggagaaggatcgagcctcacgagtttgaggtgttctttgatccaagagagctgaggaaggagacatgcctgctgtacgagatcaagtggggcacatctcacaagatctggcgccactctagcaagaacaccacaaagcacgtggaagtgaatttcatcgagaagtttaccagcgagcggcacttctgccctagcacctcctgttctatcacatggtttctgagctggtccccatgcggcgagtgtagcaaggccatcaccgagttcctgtcccagcacccaaacgtgaccctggtcatctacgtggccaggctgtatcaccacatggaccagcagaacaggcagggcctgcgggatctggtgaattccggcgtgaccatccagatcatgacagcccccgagtacgattactgttggagaaacttcgtgaactacccacctggcaaggaggcacactggcctaggtacccacccctgtggatgaagctgtatgcactggagctgcacgcaggaatcctgggcctgcctccatgcctgaatatcctgcgccggaagcagccccagctgaccttctttacaatcgccctgcagagctgtcactaccagcggctgccacctcacatcctgtgggcaaccggcctgaagtctggaggatcctctggaggaagctccggaagcgagacaccaggcacatctgagagcgccacaccagagtctagcggcggctcctctggaggatcctacacccgggtgggaagcggatccggatctggaagcatcaccaggaccacaaaccctcgcaatgtggtgccaaagatctacatgtccgccggctctatccctctgaccacacacatcacaaacagcatccagccaaccctgtggacaatcggatccatcaatggagtggcaccactggccaagtctatcaagctgggcatccctgtgaccggcagcgcctacacagaccagaccacagccatggtgcggaagaaggtgagcgtgttcatgggcagcggatctggaagcggatctagcatgaccgcggtcatggactataaggaccacgacggagactacaaggatcatgatattgattacaaagacgatgacgataagatggccccaaagaagaagcggaaggtcggtatccacggagtcccagcagccgtagatttgagaactttgggatattcacagcagcagcaggaaaagatcaagcccaaagtgaggtcgacagtcgcgcagcatcacgaagcgctggtgggtcatgggtttacacatgcccacatcgtagccttgtcgcagcaccctgcagcccttggcacggtcgccgtcaagtaccaggacatgattgcggcgttgccggaagccacacatgaggcgatcgtcggtgtggggaaacagtggagcggagcccgagcgcttgaggccctgttgacggtcgcgggagagctgagagggcctccccttcagctggacacgggccagttgctgaagatcgcgaagcggggaggagtcacggcggtcgaggcggtacacgcgtggcgcaatgcgctcacgggagcacccctcaacctgacccccgaccaggttgtcgctattgctagtaacggcggaggcaaacaggcgctggaaacagttcagcgcctcttgccggtcttgtgtcaggaccacggcctgacccccgaacaggttgtcgctattgctagtaacggcggaggcaaacaggcgctggaaacagttcagcgcctcttgccggtcttgtgtcaggcccacggcctgaccccagaccaagttgtcgcgattgcaagcaacaacggaggcaaacaagccttagaaacagtccagagattgttgcctgtgctgtgccaagcccacggcctgaccccggcccaggtggttgcaatcgcgtcacacgatgggggaaagcaggccctagaaaccgttcagcgactcctgcccgtcctgtgccaggaccacggcctgaccccggaccaggtggttgcaatcgcgtcacacgatgggggaaagcaggccctagaaaccgttcagcgactcctgcccgtcctgtgccaggaccacggcctgaccccagaacaggttgtggccatcgccagcaacataggtggcaagcaggccctcgaaaccgtccagagactgttaccggttctctgccaggcccacggcctgaccccggaccaggtggttgcaatcgcgtcacacgatgggggaaagcaggccctagaaaccgttcagcgactcctgcccgtcctgtgccaggcccacggcctgaccccagcccaggttgtggccatcgccagcaacataggtggcaagcaggccctcgaaaccgtccagagactgttaccggttctctgccaggaccacggcctgaccccggaccaggtggttgcaatcgcgtcacacgatgggggaaagcaggccctagaaaccgttcagcgactcctgcccgtcctgtgccaggaccacggcctgacccccgaacaggttgtcgctattgctagtaacggcggaggcaaacaggcgctggaaacagttcagcgcctcttgccggtcttgtgtcaggcccacggcctgaccccagaccaagttgtcgcgattgcaagcaacaacggaggcaaacaagccttagaaacagtccagagattgttgcctgtgctgtgccaagcccacggcctgaccccagcccaggttgtggccatcgccagcaacataggtggcaagcaggccctcgaaaccgtccagagactgttaccggttctctgccaggaccacggcctgaccccagaccaagttgtcgcgattgcaagcaacaacggaggcaaacaagccttagaaacagtccagagattgttgccggtgctgtgccaagaccacggcctgacccccgaacaggttgtcgctattgctagtaacggcggaggcaaacaggcgctggaaacagttcagcgcctcttgccggtcttgtgtcaggcccacggcctgaccccagaccaagttgtcgcgattgcaagcaacaacggaggcaaacaagccttagaaacagtccagagattgttgcctgtgctgtgccaagcccacggcctgaccccagcccaggttgtggccatcgccagcaacataggtggcaagcaggccctcgaaaccgtccagagactgttaccggttctctgccaggaccacggcctgacccctgagcaggtagtggctattgcatccaacaacgggggcagacccgcactggagtcaatcgtggcccagctttcgaggccggaccccgcgctggccgcactcactaatgatcatcttgtagcgctggcctgcctcggcggacgacccgccttggatgcggtgaagaaggggctcccgcacgcgcctgcattgattaagcggaccaacagaaggatccccgagaggacatcacatcgagtggcaggttcctccggaggatctggaggaagcggaggatccaccaacctgtctgacatcatcgagaaggagacaggcaagcagctggtcatccaggagagcatcctgatgctgcccgaggaggtggaggaagtgatcggcaacaagcctgagtccgatatcctggtgcacaccgcctacgacgagtccacagatgagaatgtgatgctgctgacctctgacgccccagagtataagccctgggccctggtcatccaggatagcaacggcgagaataagatcaagatgctgtccggcggaagcggaggatccggaggctctaccaatctgtccgatattattgaaaaagagacaggcaagcaactggtcatccaggagtctatcctgatgctgccagaagaagtcgaagaagtgatcggaaacaagcccgaaagcgacatcctggtccatactgcctacgacgagagtaccgacgaaaatgtgatgttactgacctccgacgcccctgagtataagccatgggctctggtcatccaggactccaatggagaaaataagatcaagatgttaagcggcggctccaagagaacagccgacggctccgagttcgagcccaagaagaagcggaaagtg

SEQ ID NO: 180 - protein, 1394 aa, Artificial Sequence
  BE4-135-63(AS7)
MKRTADGSEFESPKKKRKVSSETGPVAVDPTLRRRIEPHEFEVFFDPRELRKETCLLYEIKWGTSHKIWRHSSKNTTKHVEVNFIEKFTSERHFCPSTSCSITWFLSWSPCGECSKAITEFLSQHPNVTLVIYVARLYHHMDQQNRQGLRDLVNSGVTIQIMTAPEYDYCWRNFVNYPPGKEAHWPRYPPLWMKLYALELHAGILGLPPCLNILRRKQPQLTFFTIALQSCHYQRLPPHILWATGLKSGGSSGGSSGSETPGTSESATPESSGGSSGGSYTRVGSGSGSGSITRTTNPRNVVPKIYMSAGSIPLTTHITNSIQPTLWTIGSINGVAPLAKSIKLGIPVTGSAYTDQTTAMVRKKVSVFMGSGSGSGSSMTAVMDYKDHDGDYKDHDIDYKDDDDKMAPKKKRKVGIHGVPAAVDLRTLGYSQQQQEKIKPKVRSTVAQHHEALVGHGFTHAHIVALSQHPAALGTVAVKYQDMIAALPEATHEAIVGVGKQWSGARALEALLTVAGELRGPPLQLDTGQLLKIAKRGGVTAVEAVHAWRNALTGAPLNLTPDQVVAIASNGGGKQALETVQRLLPVLCQDHGLTPEQVVAIASNGGGKQALETVQRLLPVLCQAHGLTPDQVVAIASNNGGKQALETVQRLLPVLCQAHGLTPAQVVAIASHDGGKQALETVQRLLPVLCQDHGLTPDQVVAIASHDGGKQALETVQRLLPVLCQDHGLTPEQVVAIASNIGGKQALETVQRLLPVLCQAHGLTPDQVVAIASHDGGKQALETVQRLLPVLCQAHGLTPAQVVAIASNIGGKQALETVQRLLPVLCQDHGLTPDQVVAIASHDGGKQALETVQRLLPVLCQDHGLTPEQVVAIASNGGGKQALETVQRLLPVLCQAHGLTPDQVVAIASNNGGKQALETVQRLLPVLCQAHGLTPAQVVAIASNIGGKQALETVQRLLPVLCQDHGLTPDQVVAIASNNGGKQALETVQRLLPVLCQDHGLTPEQVVAIASNGGGKQALETVQRLLPVLCQAHGLTPDQVVAIASNNGGKQALETVQRLLPVLCQAHGLTPAQVVAIASNIGGKQALETVQRLLPVLCQDHGLTPEQVVAIASNNGGRPALESIVAQLSRPDPALAALTNDHLVALACLGGRPALDAVKKGLPHAPALIKRTNRRIPERTSHRVAGSSGGSGGSGGSTNLSDIIEKETGKQLVIQESILMLPEEVEEVIGNKPESDILVHTAYDESTDENVMLLTSDAPEYKPWALVIQDSNGENKIKMLSGGSGGSGGSTNLSDIIEKETGKQLVIQESILMLPEEVEEVIGNKPESDILVHTAYDESTDENVMLLTSDAPEYKPWALVIQDSNGENKIKMLSGGSKRTADGSEFEPKKKRKV

SEQ ID NO: 181 - DNA, 3987 bp, Artificial Sequence
  ABE8e-135-47(AS5)
atgaagcgcaccgccgacggctctgagttcgagagccccaagaagaagcggaaggtgtctgaggtggagttttcccacgagtattggatgagacatgcactgaccctggcaaagagggcacgcgatgagagggaagtccctgtcggcgccgtgctggtgctgaacaacagagtgatcggcgagggatggaacagggcaatcggcctgcacgaccctacagcccatgccgaaattatggccctgaggcagggaggcctggtcatgcagaactaccgcctgattgacgccaccctgtacgtgacattcgagccttgcgtgatgtgcgccggcgcaatgatccacagcaggatcggaagggtggtgtttggctggcgcaactcaaaaagaggagcagcaggctccctgatgaacgtgctgaactacccaggcatgaatcaccgggtcgaaattaccgagggaatcctggcagatgaatgtgccgccctgctgtgcgatttctatcggatgcccagacaggtgttcaatgctcagaagaaggcccagagctccatcaactctggaggatcctctggaggaagctccggaagcgagacaccaggcacatctgagagcgccacaccagagtctagcggcggctcctctggaggatcctacacccgggtgggaagcggatccggatctggaagcatcaccaggaccacaaaccctcgcaatgtggtgccaaagatctacatgtccgccggctctatccctctgaccacacacatcacaaacagcatccagccaaccctgtggacaatcggatccatcaatggagtggcaccactggccaagtctatcaagctgggcatccctgtgaccggcagcgcctacacagaccagaccacagccatggtgcggaagaaggtgagcgtgttcatgggcagcggatctggaagcggatctagcatgaccgcggtcatggcttcctcccctccaaagaaaaagagaaaggttgcggccgctgactacaaggatgacgacgataaaagttggaaggacgcaagtggttggtctagaatgcatgcggccccgcgacggcgtgctgcgcaaccctccgacgcttcgccggccgcgcaggtggatctacgcacgctcggctacagtcagcagcagcaagagaagatcaaaccgaaggtgcgttcgacagtggcgcagcaccacgaggcactggtgggccatgggtttacacacgcgcacatcgttgcgctcagccaacacccggcagcgttagggaccgtcgctgtcacgtatcagcacataatcacggcgttgccagaggcgacacacgaagacatcgttggcgtcggcaaacagtggtccggcgcacgcgccctggaggccttgctcacggatgcgggggagttgagaggtccgccgttacagttggacacaggccaacttgtgaagattgcaaaacgtggcggcgtgaccgcaatggaggcagtgcatgcatcgcgcaatgcgctcacgggagcacccctcaacctgaccccagaccaagttgtcgcgattgcaagcaacaacggaggcaaacaagccttagaaacagtccagagattgttgccggtgctgtgccaagaccacggcctgaccccggaacaggtggttgcaatcgcgtcacacgatgggggaaagcaggccctagaaaccgttcagcgactcctgcccgtcctgtgccaggcccacggcctgaccccagaccaggttgtggccatcgccagcaacataggtggcaagcaggccctcgaaaccgtccagagactgttaccggttctctgccaggcccacggcctgaccccagcccaagttgtcgcgattgcaagcaacaacggaggcaaacaagccttagaaacagtccagagattgttgccggtgctgtgccaagaccacggcctgacccccgaccaggttgtcgctattgctagtaacggcggaggcaaacaggcgctggaaacagttcagcgcctcttgccggtcttgtgtcaggaccacggcctgaccccagaacaggttgtggccatcgccagcaacataggtggcaagcaggccctcgaaaccgtccagagactgttaccggttctctgccaggcccacggcctgaccccagaccaagttgtcgcgattgcaagcaacaacggaggcaaacaagccttagaaacagtccagagattgttgcctgtgctgtgccaagcccacggcctgaccccggcccaggtggttgcaatcgcgtcacacgatgggggaaagcaggccctagaaaccgttcagcgactcctgcccgtcctgtgccaggaccacggcctgacccccgaccaggttgtcgctattgctagtaacggcggaggcaaacaggcgctggaaacagttcagcgcctcttgccggtcttgtgtcaggaccacggcctgaccccggaacaggtggttgcaatcgcgtcacacgatgggggaaagcaggccctagaaaccgttcagcgactcctgcccgtcctgtgccaggcccacggcctgacccccgaccaggttgtcgctattgctagtaacggcggaggcaaacaggcgctggaaacagttcagcgcctcttgccggtcttgtgtcaggcccacggcctgaccccagcccaggttgtggccatcgccagcaacataggtggcaagcaggccctcgaaaccgtccagagactgttaccggttctctgccaggaccacggcctgaccccagaccaggttgtggccatcgccagcaacataggtggcaagcaggccctcgaaaccgtccagagactgttaccggttctctgccaggaccacggcctgaccccggaacaggtggttgcaatcgcgtcacacgatgggggaaagcaggccctagaaaccgttcagcgactcctgcccgtcctgtgccaggcccacggcctgaccccagaccaggttgtggccatcgccagcaacataggtggcaagcaggccctcgaaaccgtccagagactgttaccggttctctgccaggcccacggcctgaccccagcccaagttgtcgcgattgcaagcaacaacggaggcaaacaagccttagaaacagtccagagattgttgccggtgctgtgccaagaccacggcctgacccctgagcaggtagtggctattgcatccaacaacgggggcagacccgcactggagtcaatcgtggcccagctttcgaggccggaccccgcgctggccgcactcactaatgatcatcttgtagcgctggcctgcctcggcggacgtcctgccatggatgcagtgaaaaagggattgccgcacgcgccggaattgatcagatcctccggaggatctggaggaagcggaggatccaccaacctgtctgacatcatcgagaaggagacaggcaagcagctggtcatccaggagagcatcctgatgctgcccgaggaggtggaggaagtgatcggcaacaagcctgagtccgatatcctggtgcacaccgcctacgacgagtccacagatgagaatgtgatgctgctgacctctgacgccccagagtataagccctgggccctggtcatccaggatagcaacggcgagaataagatcaagatgctgtccggcggaagcggaggatccggaggctctaccaatctgtccgatattattgaaaaagagacaggcaagcaactggtcatccaggagtctatcctgatgctgccagaagaagtcgaagaagtgatcggaaacaagcccgaaagcgacatcctggtccatactgcctacgacgagagtaccgacgaaaatgtgatgttactgacctccgacgcccctgagtataagccatgggctctggtcatccaggactccaatggagaaaataagatcaagatgttaagcggcggctccaagagaacagccgacggctccgagttcgagcccaagaagaagcggaaagtg

SEQ ID NO: 182 - protein, 1329 aa, Artificial Sequence
  ABE8e-135-47(AS5)
MKRTADGSEFESPKKKRKVSEVEFSHEYWMRHALTLAKRARDEREVPVGAVLVLNNRVIGEGWNRAIGLHDPTAHAEIMALRQGGLVMQNYRLIDATLYVTFEPCVMCAGAMIHSRIGRVVFGWRNSKRGAAGSLMNVLNYPGMNHRVEITEGILADECAALLCDFYRMPRQVFNAQKKAQSSINSGGSSGGSSGSETPGTSESATPESSGGSSGGSYTRVGSGSGSGSITRTTNPRNVVPKIYMSAGSIPLTTHITNSIQPTLWTIGSINGVAPLAKSIKLGIPVTGSAYTDQTTAMVRKKVSVFMGSGSGSGSSMTAVMASSPPKKKRKVAAADYKDDDDKSWKDASGWSRMHAAPRRRAAQPSDASPAAQVDLRTLGYSQQQQEKIKPKVRSTVAQHHEALVGHGFTHAHIVALSQHPAALGTVAVTYQHIITALPEATHEDIVGVGKQWSGARALEALLTDAGELRGPPLQLDTGQLVKIAKRGGVTAMEAVHASRNALTGAPLNLTPDQVVAIASNNGGKQALETVQRLLPVLCQDHGLTPEQVVAIASHDGGKQALETVQRLLPVLCQAHGLTPDQVVAIASNIGGKQALETVQRLLPVLCQAHGLTPAQVVAIASNNGGKQALETVQRLLPVLCQDHGLTPDQVVAIASNGGGKQALETVQRLLPVLCQDHGLTPEQVVAIASNIGGKQALETVQRLLPVLCQAHGLTPDQVVAIASNNGGKQALETVQRLLPVLCQAHGLTPAQVVAIASHDGGKQALETVQRLLPVLCQDHGLTPDQVVAIASNGGGKQALETVQRLLPVLCQDHGLTPEQVVAIASHDGGKQALETVQRLLPVLCQAHGLTPDQVVAIASNGGGKQALETVQRLLPVLCQAHGLTPAQVVAIASNIGGKQALETVQRLLPVLCQDHGLTPDQVVAIASNIGGKQALETVQRLLPVLCQDHGLTPEQVVAIASHDGGKQALETVQRLLPVLCQAHGLTPDQVVAIASNIGGKQALETVQRLLPVLCQAHGLTPAQVVAIASNNGGKQALETVQRLLPVLCQDHGLTPEQVVAIASNNGGRPALESIVAQLSRPDPALAALTNDHLVALACLGGRPAMDAVKKGLPHAPELIRSSGGSGGSGGSTNLSDIIEKETGKQLVIQESILMLPEEVEEVIGNKPESDILVHTAYDESTDENVMLLTSDAPEYKPWALVIQDSNGENKIKMLSGGSGGSGGSTNLSDIIEKETGKQLVIQESILMLPEEVEEVIGNKPESDILVHTAYDESTDENVMLLTSDAPEYKPWALVIQDSNGENKIKMLSGGSKRTADGSEFEPKKKRKV

SEQ ID NO: 183 - DNA, 3987 bp, Artificial Sequence
  ABE8e-135-47(AS6)
atgaagcgcaccgccgacggctctgagttcgagagccccaagaagaagcggaaggtgtctgaggtggagttttcccacgagtattggatgagacatgcactgaccctggcaaagagggcacgcgatgagagggaagtccctgtcggcgccgtgctggtgctgaacaacagagtgatcggcgagggatggaacagggcaatcggcctgcacgaccctacagcccatgccgaaattatggccctgaggcagggaggcctggtcatgcagaactaccgcctgattgacgccaccctgtacgtgacattcgagccttgcgtgatgtgcgccggcgcaatgatccacagcaggatcggaagggtggtgtttggctggcgcaactcaaaaagaggagcagcaggctccctgatgaacgtgctgaactacccaggcatgaatcaccgggtcgaaattaccgagggaatcctggcagatgaatgtgccgccctgctgtgcgatttctatcggatgcccagacaggtgttcaatgctcagaagaaggcccagagctccatcaactctggaggatcctctggaggaagctccggaagcgagacaccaggcacatctgagagcgccacaccagagtctagcggcggctcctctggaggatcctacacccgggtgggaagcggatccggatctggaagcatcaccaggaccacaaaccctcgcaatgtggtgccaaagatctacatgtccgccggctctatccctctgaccacacacatcacaaacagcatccagccaaccctgtggacaatcggatccatcaatggagtggcaccactggccaagtctatcaagctgggcatccctgtgaccggcagcgcctacacagaccagaccacagccatggtgcggaagaaggtgagcgtgttcatgggcagcggatctggaagcggatctagcatgaccgcggtcatggcttcctcccctccaaagaaaaagagaaaggttgcggccgctgactacaaggatgacgacgataaaagttggaaggacgcaagtggttggtctagaatgcatgcggccccgcgacggcgtgctgcgcaaccctccgacgcttcgccggccgcgcaggtggatctacgcacgctcggctacagtcagcagcagcaagagaagatcaaaccgaaggtgcgttcgacagtggcgcagcaccacgaggcactggtgggccatgggtttacacacgcgcacatcgttgcgctcagccaacacccggcagcgttagggaccgtcgctgtcacgtatcagcacataatcacggcgttgccagaggcgacacacgaagacatcgttggcgtcggcaaacagtggtccggcgcacgcgccctggaggccttgctcacggatgcgggggagttgagaggtccgccgttacagttggacacaggccaacttgtgaagattgcaaaacgtggcggcgtgaccgcaatggaggcagtgcatgcatcgcgcaatgcgctcacgggagcacccctcaacctgaccccggaccaggtggttgcaatcgcgtcacacgatgggggaaagcaggccctagaaaccgttcagcgactcctgcccgtcctgtgccaggaccacggcctgacccccgaacaggttgtcgctattgctagtaacggcggaggcaaacaggcgctggaaacagttcagcgcctcttgccggtcttgtgtcaggcccacggcctgaccccagaccaagttgtcgcgattgcaagcaacaacggaggcaaacaagccttagaaacagtccagagattgttgcctgtgctgtgccaagcccacggcctgaccccggcccaggtggttgcaatcgcgtcacacgatgggggaaagcaggccctagaaaccgttcagcgactcctgcccgtcctgtgccaggaccacggcctgaccccggaccaggtggttgcaatcgcgtcacacgatgggggaaagcaggccctagaaaccgttcagcgactcctgcccgtcctgtgccaggaccacggcctgaccccagaacaagttgtcgcgattgcaagcaacaacggaggcaaacaagccttagaaacagtccagagattgttgccggtgctgtgccaagcccacggcctgacccccgaccaggttgtcgctattgctagtaacggcggaggcaaacaggcgctggaaacagttcagcgcctcttgccggtcttgtgtcaggcccacggcctgacccccgcccaggttgtcgctattgctagtaacggcggaggcaaacaggcgctggaaacagttcagcgcctcttgccggtcttgtgtcaggaccacggcctgaccccagaccaggttgtggccatcgccagcaacataggtggcaagcaggccctcgaaaccgtccagagactgttaccggttctctgccaggaccacggcctgaccccggaacaggtggttgcaatcgcgtcacacgatgggggaaagcaggccctagaaaccgttcagcgactcctgcccgtcctgtgccaggcccacggcctgacccccgaccaggttgtcgctattgctagtaacggcggaggcaaacaggcgctggaaacagttcagcgcctcttgccggtcttgtgtcaggcccacggcctgaccccagcccaagttgtcgcgattgcaagcaacaacggaggcaaacaagccttagaaacagtccagagattgttgccggtgctgtgccaagaccacggcctgaccccggaccaggtggttgcaatcgcgtcacacgatgggggaaagcaggccctagaaaccgttcagcgactcctgcccgtcctgtgccaggaccacggcctgaccccggaacaggtggttgcaatcgcgtcacacgatgggggaaagcaggccctagaaaccgttcagcgactcctgcccgtcctgtgccaggcccacggcctgaccccggaccaggtggttgcaatcgcgtcacacgatgggggaaagcaggccctagaaaccgttcagcgactcctgcccgtcctgtgccaggcccacggcctgacccccgcccaggttgtcgctattgctagtaacggcggaggcaaacaggcgctggaaacagttcagcgcctcttgccggtcttgtgtcaggaccacggcctgacccctgagcaggtagtggctattgcatccaacaacgggggcagacccgcactggagtcaatcgtggcccagctttcgaggccggaccccgcgctggccgcactcactaatgatcatcttgtagcgctggcctgcctcggcggacgtcctgccatggatgcagtgaaaaagggattgccgcacgcgccggaattgatcagatcctccggaggatctggaggaagcggaggatccaccaacctgtctgacatcatcgagaaggagacaggcaagcagctggtcatccaggagagcatcctgatgctgcccgaggaggtggaggaagtgatcggcaacaagcctgagtccgatatcctggtgcacaccgcctacgacgagtccacagatgagaatgtgatgctgctgacctctgacgccccagagtataagccctgggccctggtcatccaggatagcaacggcgagaataagatcaagatgctgtccggcggaagcggaggatccggaggctctaccaatctgtccgatattattgaaaaagagacaggcaagcaactggtcatccaggagtctatcctgatgctgccagaagaagtcgaagaagtgatcggaaacaagcccgaaagcgacatcctggtccatactgcctacgacgagagtaccgacgaaaatgtgatgttactgacctccgacgcccctgagtataagccatgggctctggtcatccaggactccaatggagaaaataagatcaagatgttaagcggcggctccaagagaacagccgacggctccgagttcgagcccaagaagaagcggaaagtg

SEQ ID NO: 184 - protein, 1329 aa, Artificial Sequence
  ABE8e-135-47(AS6)
MKRTADGSEFESPKKKRKVSEVEFSHEYWMRHALTLAKRARDEREVPVGAVLVLNNRVIGEGWNRAIGLHDPTAHAEIMALRQGGLVMQNYRLIDATLYVTFEPCVMCAGAMIHSRIGRVVFGWRNSKRGAAGSLMNVLNYPGMNHRVEITEGILADECAALLCDFYRMPRQVFNAQKKAQSSINSGGSSGGSSGSETPGTSESATPESSGGSSGGSYTRVGSGSGSGSITRTTNPRNVVPKIYMSAGSIPLTTHITNSIQPTLWTIGSINGVAPLAKSIKLGIPVTGSAYTDQTTAMVRKKVSVFMGSGSGSGSSMTAVMASSPPKKKRKVAAADYKDDDDKSWKDASGWSRMHAAPRRRAAQPSDASPAAQVDLRTLGYSQQQQEKIKPKVRSTVAQHHEALVGHGFTHAHIVALSQHPAALGTVAVTYQHIITALPEATHEDIVGVGKQWSGARALEALLTDAGELRGPPLQLDTGQLVKIAKRGGVTAMEAVHASRNALTGAPLNLTPDQVVAIASHDGGKQALETVQRLLPVLCQDHGLTPEQVVAIASNGGGKQALETVQRLLPVLCQAHGLTPDQVVAIASNNGGKQALETVQRLLPVLCQAHGLTPAQVVAIASHDGGKQALETVQRLLPVLCQDHGLTPDQVVAIASHDGGKQALETVQRLLPVLCQDHGLTPEQVVAIASNNGGKQALETVQRLLPVLCQAHGLTPDQVVAIASNGGGKQALETVQRLLPVLCQAHGLTPAQVVAIASNGGGKQALETVQRLLPVLCQDHGLTPDQVVAIASNIGGKQALETVQRLLPVLCQDHGLTPEQVVAIASHDGGKQALETVQRLLPVLCQAHGLTPDQVVAIASNGGGKQALETVQRLLPVLCQAHGLTPAQVVAIASNNGGKQALETVQRLLPVLCQDHGLTPDQVVAIASHDGGKQALETVQRLLPVLCQDHGLTPEQVVAIASHDGGKQALETVQRLLPVLCQAHGLTPDQVVAIASHDGGKQALETVQRLLPVLCQAHGLTPAQVVAIASNGGGKQALETVQRLLPVLCQDHGLTPEQVVAIASNNGGRPALESIVAQLSRPDPALAALTNDHLVALACLGGRPAMDAVKKGLPHAPELIRSSGGSGGSGGSTNLSDIIEKETGKQLVIQESILMLPEEVEEVIGNKPESDILVHTAYDESTDENVMLLTSDAPEYKPWALVIQDSNGENKIKMLSGGSGGSGGSTNLSDIIEKETGKQLVIQESILMLPEEVEEVIGNKPESDILVHTAYDESTDENVMLLTSDAPEYKPWALVIQDSNGENKIKMLSGGSKRTADGSEFEPKKKRKV

SEQ ID NO: 185 - DNA, 3987 bp, Artificial Sequence
  ABE8e-135-47(AS7)
atgaagcgcaccgccgacggctctgagttcgagagccccaagaagaagcggaaggtgtctgaggtggagttttcccacgagtattggatgagacatgcactgaccctggcaaagagggcacgcgatgagagggaagtccctgtcggcgccgtgctggtgctgaacaacagagtgatcggcgagggatggaacagggcaatcggcctgcacgaccctacagcccatgccgaaattatggccctgaggcagggaggcctggtcatgcagaactaccgcctgattgacgccaccctgtacgtgacattcgagccttgcgtgatgtgcgccggcgcaatgatccacagcaggatcggaagggtggtgtttggctggcgcaactcaaaaagaggagcagcaggctccctgatgaacgtgctgaactacccaggcatgaatcaccgggtcgaaattaccgagggaatcctggcagatgaatgtgccgccctgctgtgcgatttctatcggatgcccagacaggtgttcaatgctcagaagaaggcccagagctccatcaactctggaggatcctctggaggaagctccggaagcgagacaccaggcacatctgagagcgccacaccagagtctagcggcggctcctctggaggatcctacacccgggtgggaagcggatccggatctggaagcatcaccaggaccacaaaccctcgcaatgtggtgccaaagatctacatgtccgccggctctatccctctgaccacacacatcacaaacagcatccagccaaccctgtggacaatcggatccatcaatggagtggcaccactggccaagtctatcaagctgggcatccctgtgaccggcagcgcctacacagaccagaccacagccatggtgcggaagaaggtgagcgtgttcatgggcagcggatctggaagcggatctagcatgaccgcggtcatggcttcctcccctccaaagaaaaagagaaaggttgcggccgctgactacaaggatgacgacgataaaagttggaaggacgcaagtggttggtctagaatgcatgcggccccgcgacggcgtgctgcgcaaccctccgacgcttcgccggccgcgcaggtggatctacgcacgctcggctacagtcagcagcagcaagagaagatcaaaccgaaggtgcgttcgacagtggcgcagcaccacgaggcactggtgggccatgggtttacacacgcgcacatcgttgcgctcagccaacacccggcagcgttagggaccgtcgctgtcacgtatcagcacataatcacggcgttgccagaggcgacacacgaagacatcgttggcgtcggcaaacagtggtccggcgcacgcgccctggaggccttgctcacggatgcgggggagttgagaggtccgccgttacagttggacacaggccaacttgtgaagattgcaaaacgtggcggcgtgaccgcaatggaggcagtgcatgcatcgcgcaatgcgctcacgggagcacccctcaacctgacccccgaccaggttgtcgctattgctagtaacggcggaggcaaacaggcgctggaaacagttcagcgcctcttgccggtcttgtgtcaggaccacggcctgacccccgaacaggttgtcgctattgctagtaacggcggaggcaaacaggcgctggaaacagttcagcgcctcttgccggtcttgtgtcaggcccacggcctgaccccagaccaagttgtcgcgattgcaagcaacaacggaggcaaacaagccttagaaacagtccagagattgttgcctgtgctgtgccaagcccacggcctgaccccggcccaggtggttgcaatcgcgtcacacgatgggggaaagcaggccctagaaaccgttcagcgactcctgcccgtcctgtgccaggaccacggcctgaccccggaccaggtggttgcaatcgcgtcacacgatgggggaaagcaggccctagaaaccgttcagcgactcctgcccgtcctgtgccaggaccacggcctgaccccagaacaggttgtggccatcgccagcaacataggtggcaagcaggccctcgaaaccgtccagagactgttaccggttctctgccaggcccacggcctgaccccggaccaggtggttgcaatcgcgtcacacgatgggggaaagcaggccctagaaaccgttcagcgactcctgcccgtcctgtgccaggcccacggcctgaccccagcccaggttgtggccatcgccagcaacataggtggcaagcaggccctcgaaaccgtccagagactgttaccggttctctgccaggaccacggcctgaccccggaccaggtggttgcaatcgcgtcacacgatgggggaaagcaggccctagaaaccgttcagcgactcctgcccgtcctgtgccaggaccacggcctgacccccgaacaggttgtcgctattgctagtaacggcggaggcaaacaggcgctggaaacagttcagcgcctcttgccggtcttgtgtcaggcccacggcctgaccccagaccaagttgtcgcgattgcaagcaacaacggaggcaaacaagccttagaaacagtccagagattgttgcctgtgctgtgccaagcccacggcctgaccccagcccaggttgtggccatcgccagcaacataggtggcaagcaggccctcgaaaccgtccagagactgttaccggttctctgccaggaccacggcctgaccccagaccaagttgtcgcgattgcaagcaacaacggaggcaaacaagccttagaaacagtccagagattgttgccggtgctgtgccaagaccacggcctgacccccgaacaggttgtcgctattgctagtaacggcggaggcaaacaggcgctggaaacagttcagcgcctcttgccggtcttgtgtcaggcccacggcctgaccccagaccaagttgtcgcgattgcaagcaacaacggaggcaaacaagccttagaaacagtccagagattgttgcctgtgctgtgccaagcccacggcctgaccccagcccaggttgtggccatcgccagcaacataggtggcaagcaggccctcgaaaccgtccagagactgttaccggttctctgccaggaccacggcctgacccctgagcaggtagtggctattgcatccaacaacgggggcagacccgcactggagtcaatcgtggcccagctttcgaggccggaccccgcgctggccgcactcactaatgatcatcttgtagcgctggcctgcctcggcggacgtcctgccatggatgcagtgaaaaagggattgccgcacgcgccggaattgatcagatcctccggaggatctggaggaagcggaggatccaccaacctgtctgacatcatcgagaaggagacaggcaagcagctggtcatccaggagagcatcctgatgctgcccgaggaggtggaggaagtgatcggcaacaagcctgagtccgatatcctggtgcacaccgcctacgacgagtccacagatgagaatgtgatgctgctgacctctgacgccccagagtataagccctgggccctggtcatccaggatagcaacggcgagaataagatcaagatgctgtccggcggaagcggaggatccggaggctctaccaatctgtccgatattattgaaaaagagacaggcaagcaactggtcatccaggagtctatcctgatgctgccagaagaagtcgaagaagtgatcggaaacaagcccgaaagcgacatcctggtccatactgcctacgacgagagtaccgacgaaaatgtgatgttactgacctccgacgcccctgagtataagccatgggctctggtcatccaggactccaatggagaaaataagatcaagatgttaagcggcggctccaagagaacagccgacggctccgagttcgagcccaagaagaagcggaaagtg

SEQ ID NO: 186 - protein, 1329 aa, Artificial Sequence
  ABE8e-135-47(AS7)
MKRTADGSEFESPKKKRKVSEVEFSHEYWMRHALTLAKRARDEREVPVGAVLVLNNRVIGEGWNRAIGLHDPTAHAEIMALRQGGLVMQNYRLIDATLYVTFEPCVMCAGAMIHSRIGRVVFGWRNSKRGAAGSLMNVLNYPGMNHRVEITEGILADECAALLCDFYRMPRQVFNAQKKAQSSINSGGSSGGSSGSETPGTSESATPESSGGSSGGSYTRVGSGSGSGSITRTTNPRNVVPKIYMSAGSIPLTTHITNSIQPTLWTIGSINGVAPLAKSIKLGIPVTGSAYTDQTTAMVRKKVSVFMGSGSGSGSSMTAVMASSPPKKKRKVAAADYKDDDDKSWKDASGWSRMHAAPRRRAAQPSDASPAAQVDLRTLGYSQQQQEKIKPKVRSTVAQHHEALVGHGFTHAHIVALSQHPAALGTVAVTYQHIITALPEATHEDIVGVGKQWSGARALEALLTDAGELRGPPLQLDTGQLVKIAKRGGVTAMEAVHASRNALTGAPLNLTPDQVVAIASNGGGKQALETVQRLLPVLCQDHGLTPEQVVAIASNGGGKQALETVQRLLPVLCQAHGLTPDQVVAIASNNGGKQALETVQRLLPVLCQAHGLTPAQVVAIASHDGGKQALETVQRLLPVLCQDHGLTPDQVVAIASHDGGKQALETVQRLLPVLCQDHGLTPEQVVAIASNIGGKQALETVQRLLPVLCQAHGLTPDQVVAIASHDGGKQALETVQRLLPVLCQAHGLTPAQVVAIASNIGGKQALETVQRLLPVLCQDHGLTPDQVVAIASHDGGKQALETVQRLLPVLCQDHGLTPEQVVAIASNGGGKQALETVQRLLPVLCQAHGLTPDQVVAIASNNGGKQALETVQRLLPVLCQAHGLTPAQVVAIASNIGGKQALETVQRLLPVLCQDHGLTPDQVVAIASNNGGKQALETVQRLLPVLCQDHGLTPEQVVAIASNGGGKQALETVQRLLPVLCQAHGLTPDQVVAIASNNGGKQALETVQRLLPVLCQAHGLTPAQVVAIASNIGGKQALETVQRLLPVLCQDHGLTPEQVVAIASNNGGRPALESIVAQLSRPDPALAALTNDHLVALACLGGRPAMDAVKKGLPHAPELIRSSGGSGGSGGSTNLSDIIEKETGKQLVIQESILMLPEEVEEVIGNKPESDILVHTAYDESTDENVMLLTSDAPEYKPWALVIQDSNGENKIKMLSGGSGGSGGSTNLSDIIEKETGKQLVIQESILMLPEEVEEVIGNKPESDILVHTAYDESTDENVMLLTSDAPEYKPWALVIQDSNGENKIKMLSGGSKRTADGSEFEPKKKRKV

SEQ ID NO: 187 - DNA, 59 bp, Artificial Sequence
  N-CBE-7bp
ctagcataaaacctttgcccgcttctgtagggaagacggatatctcctgcgggggagct

SEQ ID NO: 188 - DNA, 65 bp, Artificial Sequence
  N-CBE-13bp
ctagcataaaacctttgcccgcttctgtactatttgggaagacggatatctcctgcgggggagct

SEQ ID NO: 189 - DNA, 71 bp, Artificial Sequence
  N-CBE-19bp
ctagcataaaacctttgcccgcttctgtaattagtctatttgggaagacggatatctcctgcgggggagct

SEQ ID NO: 190 - DNA, 77 bp, Artificial Sequence
  N-CBE-25bp
ctagcataaaacctttgcccgcttctgtattcaggattagtctatttgggaagacggatatctcctgcgggggagct

SEQ ID NO: 191 - DNA, 83 bp, Artificial Sequence
  N-CBE-31bp
ctagcataaaacctttgcccgcttctgtaagtctattcaggattagtctatttgggaagacggatatctcctgcgggggagct

SEQ ID NO: 192 - DNA, 50 bp, Artificial Sequence
  N-ABE-7bp
ctagcaccatggcgcctttgcccgcttctgtacgcgcttagtctttcggc

SEQ ID NO: 193 - DNA, 56 bp, Artificial Sequence
  N-ABE-13bp
ctagcaccatggcgcctttgcccgcttctgtagcctcccgcgcttagtctttcggc

SEQ ID NO: 194 - DNA, 62 bp, Artificial Sequence
  N-ABE-19bp
ctagcaccatggcgcctttgcccgcttctgtacccaacgcctcccgcgcttagtctttcggc

SEQ ID NO: 195 - DNA, 68 bp, Artificial Sequence
  N-ABE-25bp
ctagcaccatggcgcctttgcccgcttctgtagcaggccccaacgcctcccgcgcttagtctttcggc

SEQ ID NO: 196 - DNA, 74 bp, Artificial Sequence
  N-ABE-31bp
ctagcaccatggcgcctttgcccgcttctgtagctggagcaggccccaacgcctcccgcgcttagtctttcggc

SEQ ID NO: 197 - DNA, 20 bp, Artificial Sequence
  sgRNA-N-CBE
gaagacggatatctcctgcg

SEQ ID NO: 198 - DNA, 20 bp, Artificial Sequence
  sgRNA-N-ABE
gcttagtctttcggctcgag

SEQ ID NO: 199 - DNA, 20 bp, Artificial Sequence
  sgRNA-AS3
cagagatggccaggttgagc

SEQ ID NO: 200 - DNA, 20 bp, Artificial Sequence
  sgRNA-AS14
caggccaaagaattcctgga

SEQ ID NO: 201 - DNA, 20 bp, Artificial Sequence
  sgRNA-AS5
agaattcctggaaggtgttc

SEQ ID NO: 202 - DNA, 20 bp, Artificial Sequence
  sgRNA-AS6
tgcaccatggtgtctgtttg

SEQ ID NO: 203 - DNA, 20 bp, Artificial Sequence
  sgRNA-AS7
gtgagccaggccatcactaa

SEQ ID NO: 204 - DNA, 20 bp, Artificial Sequence
  sgRNA-S2
cgtggatcctgagaacttca

SEQ ID NO: 205 - DNA, 35 bp, Artificial Sequence
  CCR5-AS3-F2
caagatggattatcaagtgtcaagtccaatctatg

SEQ ID NO: 206 - DNA, 34 bp, Artificial Sequence
  CCR5-AS3-R2
tgatgaagaagattccagagaagaagcctataaa

SEQ ID NO: 207 - DNA, 27 bp, Artificial Sequence
  CCR2-AS3-F
aacgagagcggtgaagaagtcaccacc

SEQ ID NO: 208 - DNA, 29 bp, Artificial Sequence
  CCR2-AS3-R
aagaagattccgccaaaataaccgatgtg

SEQ ID NO: 209 - DNA, 35 bp, Artificial Sequence
  CCR5-AS14-F1
gcagctctcattttccatacagtcagtatcaattc

SEQ ID NO: 210 - DNA, 33 bp, Artificial Sequence
  CCR5-AS14-R
caatgtgcttttggaagaagactaagaggtagt

SEQ ID NO: 211 - DNA, 28 bp, Artificial Sequence
  CCR2-AS14-F1
tgtctgtggcccttattttccacgagga

SEQ ID NO: 212 - DNA, 28 bp, Artificial Sequence
  CCR2-AS14-R1
tgctttcggaagaacaccgagagatacc

SEQ ID NO: 213 - DNA, 26 bp, Artificial Sequence
  HBB-AS6-F2
cctgtggagccacaccctagggttgg

SEQ ID NO: 214 - DNA, 30 bp, Artificial Sequence
  HBB-AS6-R2
taagggtgggaaaatagaccaataggcaga

SEQ ID NO: 215 - DNA, 35 bp, Artificial Sequence
  HBD-AS6-F
tagtggaatgaaggttcatttttcattctcacaaa

SEQ ID NO: 216 - DNA, 27 bp, Artificial Sequence
  HBD-AS6-R
tgagggtaggaaaacagcccaagggac

SEQ ID NO: 217 - DNA, 28 bp, Artificial Sequence
  HBB-S2-F
gcactgactctctctgcctattggtcta

SEQ ID NO: 218 - DNA, 30 bp, Artificial Sequence
  HBB-S2-R
ccctgttacttatccccttcctatgacatg

SEQ ID NO: 219 - DNA, 27 bp, Artificial Sequence
  HBD-S2-F
ggcactgactctctgtcccttgggctg

SEQ ID NO: 220 - DNA, 28 bp, Artificial Sequence
  HBD-S2-R
caaaaatgtgggagaagagcaggtaggt

SEQ ID NO: 221 - DNA, 60 bp, Homo sapiens
tgagcccagaaggggacagtaagaaggaaaaacaggtcagagatggccaggttgagcagg

SEQ ID NO: 222 - DNA, 60 bp, Homo sapiens
tagcttggtccaacctgttagagctactgcaattattcaggccaaagaattcctggaagg

SEQ ID NO: 223 - DNA, 59 bp, Homo sapiens
tgccacactgagtgagctgcactgtgacaagctgcacgtggatcctgagaacttcaggg

SEQ ID NO: 224 - DNA, 55 bp, Homo sapiens
cctgttagagctactgcaattattcaggccaaagaattcctggaaggtgttcagg

SEQ ID NO: 225 - DNA, 56 bp, Homo sapiens
ttggtccaacctgttagagctactgcaattattcaggccaaagaattcctggaagg

SEQ ID NO: 226 - DNA, 60 bp, Homo sapiens
cagggcagtaacggcagacttctcctcaggagtcagatgcaccatggtgtctgtttgagg

SEQ ID NO: 227 - DNA, 62 bp, Homo sapiens
ctcactcagtgtggcaaaggtgcccttgaggttgtccaggtgagccaggccatcactaaagg
